(19) United States
(12) Patent Application Publication
(10) Pub. No.: US 2011/0195409 A1
(43) Pub. Date: Aug. 11, 2011

(54) STREPTOCOCCUS PYOGENES CLASSIFICATION

(75) Inventors: Guido Grandi, Milano (IT); Marirosa Mora, Siena (IT); John L. Telford, Monteriggioni (IT); Chiara Zingaretti, Ravenna (IT); Fabiana Falugi, Monteriggioni (IT)

(73) Assignee: Novartis Vaccines and Diagnostics SRL, Siena (IT)

(21) Appl. No.: 12/741,514

(22) PCT Filed: Nov. 6, 2008
(86) PCT No.: PCT/GB2008/003769

§ 371 Date: Mar. 23, 2011

(30) Foreign Application Priority Data
Nov. 6, 2007 (GB) 0721757.6

(51) Int. Cl. C12Q 1/68; C07K 7/06; C07K 14/315; C07H 21/00; C07K 16/12; C09K 3/00

(52) U.S. Cl. 435/6.11; 530/329; 530/328; 530/327; 530/326; 530/325; 530/324; 530/350; 536/23.7; 530/387.9; 252/182.12

(57) ABSTRACT

The difference Lancefield T-serotypes correlate with the sequence of the pilus backbone protein (Pbp) in Streptococcus pyogenes (GAS). We have sequenced Pbp for over 50 GAS strains, representing the major disease-associated serotypes, and have identified 15 Pbp variants. These 15 variants have been shown to determine the specificity of the T-serotyping, such that sequencing of the Pbp from a given GAS strain reliably predicts that strain's T-serotype. thus the invention permits the t-serotype of a GAS strain to be determined based on genotype.

[0001] This application claims the benefit of United Kingdom patent application 0721757.3 filed on 6 Nov. 2007, the complete contents of which are incorporated herein by reference.

### TECHNICAL FIELD

[0002] This invention is in the field of classifying Streptococcus pyogenes (GAS) strains.

### BACKGROUND ART

[0003] More than 50 years ago Lancefield and colleagues classified GAS strains on the basis of serological recognition of the trypsin-sensitive M antigen and of a trypsin-resistant antigen known as the T antigen [1,2]. While the M-protein has been thoroughly studied over the last three decades, the basis of T-serotyping has not received the same attention.

[0004] There are about 20 known Lancefield T-serotypes (including 1, 2, 3, 4, 5, 6, 8, 9, 11, 12, 13, 14, 18, 22, 23, 25, 27, 28, 44, B₃₂₆₄ and Impetigo 19), some of which are overlapping or redundant. The T antigen has been used, in conjunction with the M antigen, to provide an additional tool for the sub-classification of GAS strains by an agglutination assay in which T-specific sera are used [3,4]. These T-typing sera are obtained after the streptococci are treated with trypsin, which digests the trypsin-sensitive protein molecules on the cell surface including the M protein, leaving the T antigen exposed. Furthermore, the T antigens form the basis of a major serological typing scheme that is used for those streptococci producing either no or a non-typeable M protein.

[0005] One problem with the T-serotyping system is that it relies on (i) the ability to maintain viable GAS organisms, in order to provide sufficient protein for analysis and (ii) good-quality, well-characterized antisera [5]. Moreover, some strains are often recognized by patterns of closely associated T sera rather than by single serum (e.g. T3/13/B3264, T5/27/44, T8/25/Imp19), and other strains may react non-specifically with many T sera leading to agglutination and, depending on the intensity of trypsinization, they may lose true T-protein reaction [6].

[0006] Reference 7 concludes that the Pbp, Pap1 and PrtF2 proteins all contribute to the T-type of GAS.

### DISCLOSURE OF THE INVENTION

[0007] The inventors have found that the different Lancefield T-serotypes correlate with the sequence of the pilus backbone protein (Pbp) in GAS. They have sequenced Pbp for over 50 GAS strains, representing the major disease associated serotypes, and have identified fifteen Pbp variants. Thirteen of these variants have been shown to determine the specificity of the T-serotyping, such that sequencing of the Pbp from a given GAS strain can predict that strain's T-serotype. Thus the invention permits the T-classification of a GAS strain to be determined based on genotype. Gene sequence analysis of the Pbp gene is much simpler than the existing serological assays.

[0008] The invention provides a method for determining the T-classification of a Streptococcus pyogenes bacterium, wherein the sequence of the bacterium's pbp gene is determined in whole or in part. The invention also provides a method for analysing a Streptococcus pyogenes bacterium, comprising a step in which the sequence of the bacterium's pbp gene is determined in whole or in part.

[0009] The invention also provides a method for determining the T-classification of a Streptococcus pyogenes bacterium, wherein the sequence, in whole or in part, of the bacterium's pbp gene is compared to one or more known pbp sequence(s). Usually it is compared to at least two known pbp sequences (e.g. at least 2, 3, 4, 5, 6, 7, 8, 9, 10, 11, 12, 13, 14, 15, 16, 17, 18, 19, 20 or more; preferably at least 5 sequences). If these known pbp sequences have been correlated with T-serotypes then the closest match between the bacterium's pbp sequence and the known pbp sequence permits the bacterium's T-serotype to be determined.

[0010] The invention also provides a kit for analysing a Streptococcus pyogenes bacterium, comprising primers for amplifying a nucleic acid sequence comprising the whole of part of a pbp gene from a Streptococcus pyogenes bacterium.

[0011] The sequence of the pbp gene can be compared to known sequences and the T-classification can thereby be determined. As described in more detail below, enough of the gene must be sequenced to permit it to be distinguished from the pbp genes of other T-serotypes.

[0012] The invention also provides a method for determining if a Streptococcus pyogenes bacterium has a particular T-serotype, comprising a step in which the sequence of the bacterium's pbp gene is compared to the sequence of a pbp gene from a Streptococcus pyogenes strain that is known to have the particular T-serotype, with a sequence match indicating that the bacterium has the particular T-serotype and no sequence match indicating that the bacterium does not have the particular T-serotype. Further details are provided below.

[0013] The invention also provides a method for determining if a Streptococcus pyogenes bacterium has a particular T-serotype, comprising a step in which the bacterium's pbp gene is contacted with a nucleic acid that, under the conditions of this step, gives a first signal when contacted with one of SEQ ID NOs: 58 to 70 and a second signal when contacted with each of the other SEQ ID NOs: 58 to 70, wherein the first and second signals can be distinguished from each other. Thus, for example, the step may use a primer or probe that is specific to only one of SEQ ID NOs: 58 to 70, with amplification or hybridisation being the first signal and lack of amplification or hybridisation being the second signal. This method may be performed directly on S. pyogenes nucleic acid, but will usually be performed on nucleic acid amplified therefrom. The second signal may include a variety of different sub-signals, but each of these can be distinguished from the first signal.

[0014] A relationship between sequence and T-serotype has previously been suggested. Schneewind et al. [8] cloned a gene coding for a protein recognized by the T6 antisera and located the gene in the FCT (Fibronectin-binding, Collagen-binding T-antigen) region of a M6 strain. Reference 9 reports that the T6 antigen is Pbp and that three variants of this protein are specifically recognized by three other T antisera. However, the extent of Pbp variability remained unclear until the present work, and nor was the relationship of Pbp variation to Lancefield T-serotypes fully understood. Even so, in some embodiments, the invention does not relate to the analysis of a strain with one of the six following T-serotypes: 1; 5; 6; 12; 27; 44. T-serotypes 5, 27 and 44 are closely related.

### GAS Tee-Types

[0015] The inventors have sequenced the pbp gene from over 50 GAS strains and have identified 15 distinct variants. The prototype amino acid sequences for each of the variants are SEQ ID NOs 1 to 15, encoded by SEQ ID NOs 58 to 72, respectively. 13 of the 15 variants have been correlated with T-serotypes as follows:

| | SEQ ID | | | | | | | | | | | | |
|---|---|---|---|---|---|---|---|---|---|---|---|---|---|
| | 1 | 2 | 3 | 4 | 5 | 6 | 7 | 8 | 9 | 10 | 11 | 12 | 13 |
| T-type | 1 | 2 | 3^{a} | 4 | 5^{b} | 6 | 8^{c} | 9 | 11 | 12 | 14 | 23 | 28 |

^{a}This variant also seen in T-serotype 13
^{b}This variant also seen in T-serotypes 27 and 44
^{c}This variant also seen in T-serotype 25

[0016] Sequence identity of at least 90% at the amino acid level has been observed within each of these 13 variants, but between the different variants it is generally less than 72% (see Table II).

[0017] Because of the intra-variant conservation and inter-variant variation, the sequence of a bacterium's pbp gene can readily be placed into one of these 13 groups, and thereby its T-classification can be assessed. In the event that a particular strain does not fit into any of the 13 groups then, in a similar way to the current T-system, it can be classified, at least preliminarily, as being either in one of the T-types not shown above or as being non-typeable.

[0018] A pbp gene may be sequenced in whole or in part. If partial sequence is used then its size and location within the pbp gene must be sufficient to place it in one (or none) of the 13 variants. The alignments in FIG. 4 shows the regions of pbp that are conserved between variants (i.e. unsuitable for distinguishing between them) and those that vary (i.e. can be used to distinguish the 13 variants). FIG. 4 aligns the variants within FCT types, because sequences in different FCT types align poorly and thus can readily be distinguished, whereas sequences in the same FCT type show several regions of overlap. For examples the first 180 and last 125 residues of the sequences encoding SEQ ID NOs: 3, 5, 8, 9, 10, 11, 13 and 14 are very conserved (FIG. 4A) and so a typical method to distinguish these sequences will focus on different regions. The coding sequences for SEQ ID NOs: 1 and 4 are sufficiently different from each other and from the other SEQ ID NOs: that they can readily be distinguished.

[0019] In some cases more than one partial sequence may be determined, such that the combination of the two partial sequences is enough to determine the sequence's variant type, even though each individual partial sequence might, on its own, not be enough.

[0020] Where the invention refers to comparing the sequence of two nucleic acid sequences, this comparison may be performed at a nucleic acid level, or may be performed after transforming the sequence e.g. by comparing inferred amino acid sequences encoded by the two nucleic acids, or by comparing complements and reverse complements, etc.

### Nucleic Acid Detection

[0021] Various methods are known in the art for the sequence-specific detection of nucleic acids. Any of these can be used with the invention.

[0022] One of the advantages of using nucleic acid for identifying the T-serotype of a strain rather than immunological techniques is that, because efficient nucleic acid amplification techniques are widely available, viable GAS organisms do not have to be maintained in order to provide sufficient material for analysis. On the contrary, nucleic acids can be amplified and detected even with very low amounts of original GAS material.

[0023] Thus a method of the invention may involve a step of amplifying nucleic acid present in a sample. Suitable techniques include PCR, SDA, SSSR, LCR, TMA, NASBA, T7 amplification, etc. The technique preferably gives exponential amplification. The technique may be quantitative and/or real-time. Kits and methods for amplification and detection of bacterial sequences are known in the art e.g. it is known to characterise GAS strains by emm-specific PCR [10]. Array-based techniques can also be used.

[0024] Amplification techniques generally involve the use of at least one primer. With two primers and a double-stranded target, the primers hybridize to different strands of the target and are then extended. The extended products then serve as targets for further rounds of hybridization/extension, permitting exponential amplification. The net effect is to produce an amplicon from the target, the 5′ and 3′ termini of the amplicon being defined by the locations of the two primers in the target.

[0025] Thus the invention provides a kit comprising primers for amplifying a template sequence comprising at least a part of the S. pyogenes pbp gene, the kit comprising a first primer and a second primer, wherein the first primer comprises a sequence substantially complementary to a portion of said template sequence and the second primer comprises a sequence substantially complementary to a portion of the complement of said template sequence, wherein the sequences within said primers which have substantial complementarity define the termini of the template sequence to be amplified.

[0026] Kits and methods may use primers that are specific to one pbp variant, meaning that amplification will occur when that variant is present in a sample but will not occur if the variant is absent (e.g. if a different pbp variant is present). In other embodiments, they may use primers that are not specific to any particular pbp variant, meaning that amplification will occur when various pbp variants are present in a sample. Where such non-variant-specific primers are used then the variants can be distinguished from each other by characterising the amplicons e.g. by means of variant-specific probes, by sequencing the amplicons, etc. Examples of variant-specific primers are given below.

[0027] Primers for amplifying sequences from the pbp gene may be located inside the gene or outside the gene, provided that their amplicon comprises the whole or part of the pbp gene. FIG. 1 shows the genetic environment of the pbp gene in different FCT types, and primers outside the pbp gene may be located accordingly.

[0028] Kits of the invention may further comprise primers and/or probes for generating and detecting an internal standard, in order to aid quantitative measurements.

[0029] Kits of the invention may further comprise a probe which is substantially complementary to the template sequence and/or to its complement and which can hybridize thereto. This probe can be used in a hybridization technique to detect an amplicon. Such a probe may be variant-specific.

[0030] Kits of the invention may comprise more than one pair of primers (multiplex). Multiple pairs can be used for nested amplification of a target sequence, or can be used to amplify different target sequences. For instance, a kit or method may use a plurality of primer pairs, each pair permitting amplification of different pbp variants, thereby ensuring that a single set of reagents can amplify a range of different pbp variants. Where a plurality of primer pairs is used, it is possible to have a common primer in two pairs, but at least one primer will differ in each pair, thereby giving different amplicons.

[0031] Kits of the invention may also include one or more reagents for determining a strain's M-type. Kits and reagents for emm-typing are commercially available.

[0032] Because of the nature of nucleic acid hybridisation, if a primer(s) or probe is used that is specific to a particular pbp gene, a positive signal (e.g. generation of an amplicon, or hybridisation to a probe) means that the sequence of that particular gene has been determined in whole or in part, without actual base-by-base sequencing. Such sequence-specific reagents thus provide indirect sequence determination as a result of the sequence-specific nature of their behaviour.

[0033] Example primers include SEQ ID NO:s 115-160, as shown in Table I.

### Tee-Type Detection

[0034] The invention provides a method for determining if a test GAS has a particular T-serotype by comparing the sequence of its pbp gene to the sequence of a pbp gene from a GAS that has a known T-serotype. If the sequence from the test GAS matches the known sequence then they have the same T-serotype; if the sequences do not match then they have different T-serotypes.

[0035] The invention thus provides a method for determining if a Streptococcus pyogenes bacterium has T-serotype 1, comprising a step in which the sequence of the bacterium's pbp gene is compared to the sequence of a pbp gene from a S. pyogenes strain in T-serotype 1 (e.g. to SEQ ID NO: 58), with a match indicating that the bacterium has T-serotype 1 and no match indicating that the bacterium does not have T-serotype 1.

[0036] The invention also provides a method for determining if a Streptococcus pyogenes bacterium has T-serotype 2, comprising a step in which the sequence of the bacterium's pbp gene is compared to the sequence of a pbp gene from a S. pyogenes strain in T-serotype 2 (e.g. to SEQ ID NO: 59), with a match indicating that the bacterium has T-serotype 2 and no match indicating that the bacterium does not have T-serotype 2.

[0037] The invention also provides a method for determining if a Streptococcus pyogenes bacterium has T-serotype 3 or 13, comprising a step in which the sequence of the bacterium's pbp gene is compared to the sequence of a pbp gene from a S. pyogenes strain in T-serotype 3 or 13 (e.g. to SEQ ID NO: 60), with a match indicating that the bacterium has T-serotype 3 or 13 and no match indicating that the bacterium does not have T-serotype 3 or 13.

[0038] The invention also provides a method for determining if a Streptococcus pyogenes bacterium has T-serotype 4, comprising a step in which the sequence of the bacterium's pbp gene is compared to the sequence of a pbp gene from a S. pyogenes strain in T-serotype 4 (e.g. to SEQ ID NO: 61), with a match indicating that the bacterium has T-serotype 4 and no match indicating that the bacterium does not have T-serotype 4.

[0039] The invention also provides a method for determining if a Streptococcus pyogenes bacterium has T-serotype 5, 27 or 44, comprising a step in which the sequence of the bacterium's pbp gene is compared to the sequence of a pbp gene from a S. pyogenes strain in T-serotype 5, 27 or 44 (e.g. to SEQ ID NO: 62), with a match indicating that the bacterium has T-serotype 5, 27 or 44 and no match indicating that the bacterium does not have T-serotype 5, 27 or 44.

[0040] The invention also provides a method for determining if a Streptococcus pyogenes bacterium has T-serotype 6, comprising a step in which the sequence of the bacterium's pbp gene is compared to the sequence of a pbp gene from a S. pyogenes strain in T-serotype 6 (e.g. to SEQ ID NO: 63), with a match indicating that the bacterium has T-serotype 6 and no match indicating that the bacterium does not have T-serotype 6.

[0041] The invention also provides a method for determining if a Streptococcus pyogenes bacterium has T-serotype 8 or 25, comprising a step in which the sequence of the bacterium's pbp gene is compared to the sequence of a pbp gene from a S. pyogenes strain in T-serotype 8 or 25 (e.g. to SEQ ID NO: 64), with a match indicating that the bacterium has T-serotype 8 or 25 and no match indicating that the bacterium does not have T-serotype 8 or 25.

[0042] The invention also provides a method for determining if a Streptococcus pyogenes bacterium has T-serotype 9, comprising a step in which the sequence of the bacterium's pbp gene is compared to the sequence of a pbp gene from a S. pyogenes strain in T-serotype 9 (e.g. to SEQ ID NO: 65), with a match indicating that the bacterium has T-serotype 9 and no match indicating that the bacterium does not have T-serotype 9.

[0043] The invention also provides a method for determining if a Streptococcus pyogenes bacterium has T-serotype 11, comprising a step in which the sequence of the bacterium's pbp gene is compared to the sequence of a pbp gene from a S. pyogenes strain in T-serotype 11 (e.g. to SEQ ID NO: 66), with a match indicating that the bacterium has T-serotype 11 and no match indicating that the bacterium does not have T-serotype 11.

[0044] The invention also provides a method for determining if a Streptococcus pyogenes bacterium has T-serotype 12, comprising a step in which the sequence of the bacterium's pbp gene is compared to the sequence of a pbp gene from a S. pyogenes strain in T-serotype 12 (e.g. to SEQ ID NO: 67), with a match indicating that the bacterium has T-serotype 12 and no match indicating that the bacterium does not have T-serotype 12.

[0045] The invention also provides a method for determining if a Streptococcus pyogenes bacterium has T-serotype 14, comprising a step in which the sequence of the bacterium's pbp gene is compared to the sequence of a pbp gene from a S. pyogenes strain in T-serotype 14 (e.g. to SEQ ID NO: 68), with a match indicating that the bacterium has T-serotype 14 and no match indicating that the bacterium does not have T-serotype 14.

[0046] The invention also provides a method for determining if a Streptococcus pyogenes bacterium has T-serotype 23, comprising a step in which the sequence of the bacterium's pbp gene is compared to the sequence of a pbp gene from a S. pyogenes strain in T-serotype 23 (e.g. to SEQ ID NO: 69), with a match indicating that the bacterium has T-serotype 23 and no match indicating that the bacterium does not have T-serotype 23.

[0047] The invention also provides a method for determining if a Streptococcus pyogenes bacterium has T-serotype 3, 5, 13 or 28, comprising a step in which the sequence of the bacterium's pbp gene is compared to the sequence of a pbp gene from a S. pyogenes strain in T-serotype 3, 5, 13 or 28 (e.g. to SEQ ID NO: 70), with a match indicating that the bacterium has T-serotype 3, 5, 13 or 28 and no match indicating that the bacterium does not have T-serotype 3, 5, 13 or 28.

[0048] Where the test GAS's pbp sequence is compared to the known pbp sequence, this comparison may be against one of the known pbp sequences disclosed herein (e.g. against a sequence encoding one of SEQ ID NOs: 1 to 13), or it may be against a different known pbp sequence that has sequence identity to one of the SEQ ID NOs: 1 to 13 coding sequences. Because of the low level of inter-variant sequence identity, the comparison sequence can differ substantially from SEQ ID NOs: 1 to 13 while still providing a useful result. For instance, SEQ ID NO: 1 has ≦40% identity to the other 12 sequenced pbp variants and so the comparison sequence for T-serotype I can code for SEQ ID NO: 1 or for a sequence having at least 70% identity to SEQ ID NO: 1 (e.g. at least 75%, 80%, 85%, 90%, 95%, 96%, 97%, 98%, 99% or more). The following table shows this information for full-length SEQ ID NO: 1 and for the other SEQ ID NOs 2 to 13:

| SEQ ID | Highest match | Threshold | e.g. at least % |
|---|---|---|---|
| 1 | 40% | 70% | 75%, 80%, 85%, 90%, 95%, 96%, 97%, 98%, 99% |
| 2 | 40% | 70% | 75%, 80%, 85%, 90%, 95%, 96%, 97%, 98%, 99% |
| 3 | 72% | 86% | 88%, 90%, 95%, 96%, 97%, 98%, 99% |
| 4 | 26% | 63% | 65%, 70% 75%, 80%, 85%, 90%, 95%, 96%, 97%, 98%, 99% |
| 5 | 69% | 85% | 87%, 88%, 89%, 90%, 95%, 96%, 97%, 98%, 99% |
| 6 | 55% | 88% | 90%, 95%, 96%, 97%, 98%, 99% |
| 7 | 40% | 70% | 75%, 80%, 85%, 90%, 95%, 96%, 97%, 98%, 99% |
| 8 | 60% | 80% | 85%, 90%, 95%, 96%, 97%, 98%, 99% |
| 9 | 57% | 79% | 80%, 85%, 90%, 95%, 96%, 97%, 98%, 99% |
| 10 | 65% | 83% | 85%, 90%, 95%, 96%, 97%, 98%, 99% |
| 11 | 67% | 84% | 85%, 90%, 95%, 96%, 97%, 98%, 99% |
| 12 | 55% | 88% | 90%, 95%, 96%, 97%, 98%, 99% |
| 13 | 72% | 86% | 88%, 90%, 95%, 96%, 97%, 98%, 99% |

[0049] This table also shows how a sequence match may be defined. If a comparison is being made against a pbp gene known to have T-type 1 (e.g. SEQ ID NO: 1, encoded by SEQ ID NO: 58) then a sequence identity of at least 70% can be considered as a match. In contrast, If a comparison is being made against a pbp gene known to have T-type 28 (e.g. SEQ ID NO: 13, encoded by SEQ ID NO: 70) then a sequence identity of at least 70% would not be a match.

[0050] If comparison is being made indirectly, by determining if a hybridisation event takes place (rather than by direct comparison of sequence information), these figures for inter-variant sequence identity can be used as the basis of stringency conditions for the hybridisation. For instance, SEQ ID NO: 58 (T-type 1) has no more than 40% identity to the pbp gene from any other T-type at an amino acid level, and so stringency conditions can be selected that will permit a primer or probe to hybridise to a target even when there are substantial differences. In contrast, higher stringency should be used with SEQ ID NO: 70 so as to avoid hybridisation with the pbp sequences from other T-types.

### Type-Specific Nucleic Acid Reagents

[0051] The invention provides a method for determining if test GAS bacterium has a particular T-serotype in which its pbp gene (including amplicons of the whole or part thereof) is contacted with a type-specific nucleic acid reagent i.e. a reagent that gives a particular signal when if encounters a nucleic acid target of a desired pbp variant but gives a different signal (e.g. no signal) when if encounters a nucleic acid target of a different pbp variant.

[0052] For instance, if the reagent were contacted (under the same hybridisation conditions) with each of SEQ ID NOs: 1 to 13 then it would give a particular signal for one of these thirteen target sequences but would give a different signal for the other thirteen. Thus the presence of this signal will indicate that the relevant target is present.

[0053] For example, the reagent may be a probe that can hybridise to only one of SEQ ID NOs: 58 to 70. The reagent may be a primer that can hybridise to only one of SEQ ID NOs: 58 to 70, or that has a 3′ sequence that permits extension only when it is hybridised to a particular one of SEQ ID NOs: 58 to 70. Thus the reagent may be used in combination with one or more further reagent(s) e.g. with a second primer.

[0054] Examples of variant-specific primers are indicated in FIG. 4. These can be used in their indicated orientation or in reverse complement orientation, as required.

[0055] FIG. 4A shows a forwards primer (SEQ ID NO: 161) that is common to the coding sequences of SEQ ID NOs: 3, 5, 8, 9, 10, 11, 13 and 14. This is used in combination with seven different reverse primers, as follows:

| | Target | | | | | | |
|---|---|---|---|---|---|---|---|
| | 3 | 5 | 8 | 9 | 10 | 11/14 | 13 |
| Rev primer SEQ ID: | 166 | 165 | 168 | 162 | 163 | 167 | 164 |
| Amplicon length | 685 | 530 | 865 | 145 | 308 | 767 | 395 |

[0056] Where the target sequence is in the same variant as SEQ ID NO: 11 or 14 then the primers will amplify in the same way. A probe specific to the region around nucleotides 700 of these two SEQ ID NOs can then be used to distinguish them.

[0057] FIG. 4B shows a reverse primer (SEQ ID NO: 169) that is common to the coding sequences of SEQ ID NOs: 2 and 7. This is used in combination with two different forward primers, as follows:

| Target | 2 | 7 |
|---|---|---|
| Fwd primer SEQ ID: | 170 | 171 |
| Amplicon length | 1674 | 1465 |

[0058] FIG. 4C shows a forwards primer (SEQ ID NO: 172) that is common to the coding sequences of SEQ ID NOs: 6 and 12. This is used in combination with two different reverse primers, as follows:

| Target | 6 | 12 |
|---|---|---|
| Rev primer SEQ ID: | 173 | 174 |
| Amplicon length | 1144 | 1245 |

[0059] Primer pair SEQ ID NOs 175 & 176 can be used to amplify the coding sequence of SEQ ID NO: 5.

[0060] Primer pair SEQ ID NOs 177 & 178 can be used to amplify the coding sequence of SEQ ID NO: 2.

[0061] The invention also provides a nucleic acid probe that can hybridise to only one of SEQ ID NOs: 58 to 70. The invention also provides a nucleic acid amplification primer that can hybridise to only one of SEQ ID NOs: 58 to 70. The invention also provides a nucleic acid amplification primer that has a 3′ sequence that permits extension when it is hybridised to only one of SEQ ID NOs: 58 to 70. The invention also provides a nucleic acid amplification primer that has a 3′ or 5′ sequence that permits ligation when it is hybridised to only one of SEQ ID NOs: 58 to 70. These variant-specific probes and primers thus permit the 13 different pbp variants to be uniquely identified.

### Polypeptides

[0062] The invention provides a polypeptide comprising an amino acid sequence having at least a % sequence identity to an amino acid sequence selected from the group consisting of SEQ ID NOs: 1, 2, 3, 4, 5, 6, 7, 8, 9, 10, 11, 12, 13, 14, 15, 16, 17, 18, 19, 20, 21, 22, 23, 24, 25, 26, 27, 28, 29, 30, 31, 32, 33, 34, 35, 36, 37, 38, 39, 40, 41, 42, 43, 44, 45, 46, 47, 48, 49, 50, 51, 52, 53, 54, 55, 56, 57, 179, 180, 181, 182, 183, 184, 185, 186, 187, 188, 189, 190, 191, 192, 193, 194, 195, 196, 197, 198, 199, 200, 201, 202, 203, 204, 205, 206, 207, 208, 209, 210, 211, 212, 213, 214, 215, 216, 217, 218, 219, 220, 221, 222, 223, 224, 225, 226, 227, 228, 229, 230, 231, 232, 233, 234, 235, 236, 237, 238, 239, 240, 241, 242, 243, 244, 245, 246, 247, 248, 249, 250, 251, and 252. For each of these SEQ ID NOs, the value of a may be independently selected from 50, 60, 70, 75, 80, 85, 90, 95, 96, 97, 98, 99, 99.5 or even 100. Within this list of SEQ ID NOs, numbers 1-57 are Pbp sequences, 179-216 are Pap1 sequences, and 217-252 are Pap2 sequences.

[0063] The invention also provides a polypeptide comprising a fragment of at least b consecutive amino acids of an amino acid sequence selected from the group consisting of SEQ ID NOs: 1, 2, 3, 4, 5, 6, 7, 8, 9, 10, 11, 12, 13, 14, 15, 16, 17, 18, 19, 20, 21, 22, 23, 24, 25, 26, 27, 28, 29, 30, 31, 32, 33, 34, 35, 36, 37, 38, 39, 40, 41, 42, 43, 44, 45, 46, 47, 48, 49, 50, 51, 52, 53, 54, 55, 56, 57, 179, 180, 181, 182, 183, 184, 185, 186, 187, 188, 189, 190, 191, 192, 193, 194, 195, 196, 197, 198, 199, 200, 201, 202, 203, 204, 205, 206, 207, 208, 209, 210, 211, 212, 213, 214, 215, 216, 217, 218, 219, 220, 221, 222, 223, 224, 225, 226, 227, 228, 229, 230, 231, 232, 233, 234, 235, 236, 237, 238, 239, 240, 241, 242, 243, 244, 245, 246, 247, 248, 249, 250, 251, and 252. For each of these SEQ ID NOs, the value of b may be independently selected from 5, 6, 7, 8, 9, 10, 12, 14, 16, 18, 20, 22, 24, 26, 28, 30, 35, 40, 45, 50, 60, 70, 80, 90, 100, 110, 120, 130, 140, 150 or more. The fragment, may comprise at least one T-cell or, preferably, a B-cell epitope of the sequence. T- and B-cell epitopes can be identified empirically (e.g. using PEPSCAN [11,12] or similar methods), or they can be predicted (e.g. using the Jameson-Wolf antigenic index [13], matrix-based approaches [14], TEPITOPE [15], neural networks [16], OptiMer & EpiMer [17,18], ADEPT [19], Tsites [20], hydrophilicity [21], antigenic index [22] or the methods disclosed in reference 23, etc.).

[0064] A polypeptide of the invention may meet both the sequence identity criterion and the fragment length criterion e.g. the invention also provides a polypeptide comprising an amino acid sequence having at least a % sequence identity to a particular SEQ ID NO: and comprising a fragment of at least b consecutive amino acids from that SEQ ID NO.

[0065] These polypeptides include homologs, orthologs, allelic variants and mutants. Typically, 50% identity or more between two polypeptide sequences is considered to be an indication of functional equivalence. Identity between polypeptides is preferably determined by the Smith-Waterman homology search algorithm as implemented in the MPSRCH program (Oxford Molecular), using an affine gap search with parameters gap open penalty=12 and gap extension penalty=1.

[0066] Polypeptides of the invention may, compared to SEQ ID NOs: 1-57 or 179-252, include one or more (e.g. 1, 2, 3, 4, 5, 6, 7, 8, 9, 10, etc.) conservative amino acid replacements i.e. replacements of one amino acid with another which has a related side chain. Genetically-encoded amino acids are generally divided into four families: (1) acidic i.e. aspartate, glutamate; (2) basic i.e. lysine, arginine, histidine; (3) non-polar i.e. alanine, valine, leucine, isoleucine, proline, phenylalanine, methionine, tryptophan; and (4) uncharged polar i.e. glycine, asparagine, glutamine, cysteine, serine, threonine, tyrosine. Phenylalanine, tryptophan, and tyrosine are sometimes classified jointly as aromatic amino acids. In general, substitution of single amino acids within these families does not have a major effect on the biological activity. The polypeptides may have one or more (e.g. 1, 2, 3, 4, 5, 6, 7, 8, 9, 10, etc.) single amino acid deletions relative to a reference sequence. The polypeptides may also include one or more (e.g. 1, 2, 3, 4, 5, 6, 7, 8, 9, 10, etc.) insertions (e.g. each of 1, 2, 3, 4 or 5 amino acids) relative to a reference sequence.

[0067] Polypeptides of the invention can be prepared in many ways e.g. by chemical synthesis (in whole or in part), by digesting longer polypeptides using proteases, by translation from RNA, by purification from cell culture (e.g. from recombinant expression), from the organism itself (e.g. after bacterial culture, or direct from patients), etc. A preferred method for production of peptides <40 amino acids long involves in vitro chemical synthesis [24,25]. Solid-phase peptide synthesis is particularly preferred, such as methods based on tBoc or Fmoc [26] chemistry. Enzymatic synthesis [27] may also be used in part or in full. As an alternative to chemical synthesis, biological synthesis may be used e.g. the polypeptides may be produced by translation. This may be carried out in vitro or in vivo. Biological methods are in general restricted to the production of polypeptides based on L-amino acids, but manipulation of translation machinery (e.g. of aminoacyl tRNA molecules) can be used to allow the introduction of D-amino acids (or of other non natural amino acids, such as iodotyrosine or methylphenylalanine, azidohomoalanine, etc.) [28]. Where D-amino acids are included, however, it is preferred to use chemical synthesis. Polypeptides of the invention may have covalent modifications at the C-terminus and/or N-terminus.

[0068] Polypeptides of the invention can take various forms (e.g. native, fusions, glycosylated, non-glycosylated, lipidated, non-lipidated, phosphorylated, non-phosphorylated, myristoylated, non-myristoylated, monomeric, multimeric, particulate, denatured, etc.).

[0069] Polypeptides of the invention are preferably provided in purified or substantially purified form i.e. substantially free from other polypeptides (e.g. free from naturally-occurring polypeptides), particularly from other GAS or host cell polypeptides, and are generally at least about 50% pure (by weight), and usually at least about 90% pure i.e. less than about 50%, and more preferably less than about 10% (e.g. 5% or less) of a composition is made up of other expressed polypeptides. Polypeptides of the invention are preferably GAS polypeptides.

[0070] Polypeptides of the invention may be attached to a solid support. Polypeptides of the invention may comprise a detectable label (e.g. a radioactive or fluorescent label, or a biotin label).

[0071] The term “polypeptide” refers to amino acid polymers of any length. The polymer may be linear or branched, it may comprise modified amino acids, and it may be interrupted by non-amino acids. The terms also encompass an amino acid polymer that has been modified naturally or by intervention; for example, disulfide bond formation, glycosylation, lipidation, acetylation, phosphorylation, or any other manipulation or modification, such as conjugation with a labeling component. Also included within the definition are, for example, polypeptides containing one or more analogs of an amino acid (including, for example, unnatural amino acids, etc.), as well as other modifications known in the art. Polypeptides can occur as single chains or associated chains. Polypeptides of the invention can be naturally or non-naturally glycosylated (i.e. the polypeptide has a glycosylation pattern that differs from the glycosylation pattern found in the corresponding naturally occurring polypeptide).

[0072] Polypeptides of the invention may be at least 40 amino acids long (e.g. at least 40, 50, 60, 70, 80, 90, 100, 120, 140, 160, 180, 200, 220, 240, 260, 280, 300, 350, 400, 450, 500 or more). Polypeptides of the invention may be shorter than 500 amino acids (e.g. no longer than 40, 50, 60, 70, 80, 90, 100, 120, 140, 160, 180, 200, 220, 240, 260, 280, 300, 350, 400 or 450 amino acids).

[0073] The invention provides polypeptides comprising a sequence —X—Y— of —Y—X—, wherein: —X— is an amino acid sequence as defined above and —Y— is not a sequence as defined above i.e. the invention provides fusion proteins. Where the N-terminus codon of a polypeptide-coding sequence is not ATG then that codon will be translated as the standard amino acid for that codon rather than as a Met, which occurs when the codon is translated as a start codon.

[0074] The invention provides a process for producing polypeptides of the invention, comprising culturing a host cell of to the invention under conditions which induce polypeptide expression.

[0075] The invention provides a process for producing a polypeptide of the invention, wherein the polypeptide is synthesised in part or in whole using chemical means.

[0076] The invention provides a composition comprising two or more polypeptides of the invention.

### Nucleic Acids

[0077] The invention also provides a nucleic acid comprising a nucleotide sequence encoding the polypeptides of the invention e.g. SEQ ID NOs: 58, 59, 60, 61, 62, 63, 64, 65, 66, 67, 68, 69, 70, 71, 72, 73, 74, 75, 76, 77, 78, 79, 80, 81, 82, 83, 84, 85, 86, 87, 88, 89, 90, 91, 92, 93, 94, 95, 96, 97, 98, 99, 100, 101, 102, 103, 104, 105, 106, 107, 108, 109, 110, 111, 112, 113, 114, 253, 254, 255, 256, 257, 258, 259, 260, 261, 262, 263, 264, 265, 266, 267, 268, 269, 270, 271, 272, 273, 274, 275, 276, 277, 278, 279, 280, 281, 282, 283, 284, 285, 286, 287, 288, 289, 290, 291, 292, 293, 294, 295, 296, 297, 298, 299, 300, 301, 302, 303, 304, 305, 306, 307, 308, 309, 310, 311, 312, 313, 314, 315, 316, 317, 318, 319, 320, 321, 322, 323, 324, 325 and 326. The invention also provides nucleic acid comprising nucleotide sequences having sequence identity to such nucleotide sequences. Such nucleic acids include those using alternative codons to encode the same amino acid.

[0078] The invention also provides nucleic acid which can hybridize to these nucleic acids. Hybridization reactions can be performed under conditions of different “stringency”. Conditions that increase stringency of a hybridization reaction of widely known and published in the art. Examples of relevant conditions include (in order of increasing stringency): incubation temperatures of 25° C., 37° C., 50° C., 55° C. and 68° C.; buffer concentrations of 10×SSC, 6×SSC, 1×SSC, 0.1×SSC (where SSC is 0.15 M NaCl and 15 mM citrate buffer) and their equivalents using other buffer systems; formamide concentrations of 0%, 25%, 50%, and 75%; incubation times from 5 minutes to 24 hours; 1, 2, or more washing steps; wash incubation times of 1, 2, or 15 minutes; and wash solutions of 6×SSC, 0.1×SSC, 0.1×SSC, or de-ionized water. Hybridization techniques and their optimization are well known in the art [e.g. see refs 29 & 30, etc.].

[0079] Nucleic acid comprising fragments of these sequences are also provided. These should comprise at least n consecutive nucleotides from the sequences and, depending on the particular sequence, n is 10 or more (e.g. 12, 14, 15, 18, 20, 25, 30, 35, 40, 50, 60, 70, 80, 90, 100, 150, 200 or more).

[0080] The invention provides nucleic acid of formula 5′-X—Y—Z-3′, wherein: —X— is a nucleotide sequence consisting of x nucleotides; —Z— is a nucleotide sequence consisting of z nucleotides; —Y— is a nucleotide sequence consisting of either (a) a fragment of a nucleic acid sequence selected from the group consisting of SEQ ID NOs: 58, 59, 60, 61, 62, 63, 64, 65, 66, 67, 68, 69, 70, 71, 72, 73, 74, 75, 76, 77, 78, 79, 80, 81, 82, 83, 84, 85, 86, 87, 88, 89, 90, 91, 92, 93, 94, 95, 96, 97, 98, 99, 100, 101; 102, 103, 104, 105, 106, 107, 108, 109, 110, 111, 112, 113, 114, 253, 254, 255, 256, 257, 258, 259, 260, 261, 262, 263, 264, 265, 266, 267, 268, 269, 270, 271, 272, 273, 274, 275, 276, 277, 278, 279, 280, 281, 282, 283, 284, 285, 286, 287, 288, 289, 290, 291, 292, 293, 294, 295, 296, 297, 298, 299, 300, 301, 302, 303, 304, 305, 306, 307, 308, 309, 310, 311, 312, 313, 314, 315, 316, 317, 318, 319, 320, 321, 322, 323, 324, 325 and 326 or (b) the complement of (a); and said nucleic acid 5′-X—Y—Z-3′ is neither (i) a fragment of either a nucleic acid sequence selected from the group consisting of SEQ ID NOs: 58, 59, 60, 61, 62, 63, 64, 65, 66, 67, 68, 69, 70, 71, 72, 73, 74, 75, 76, 77, 78, 79, 80, 81, 82, 83, 84, 85, 86, 87, 88, 89, 90, 91, 92, 93, 94, 95, 96, 97, 98, 99, 100, 101, 102, 103, 104, 105, 106, 107, 108, 109, 110, 111, 112, 113, 114, 253, 254, 255, 256, 257, 258, 259, 260, 261, 262, 263, 264, 265, 266, 267, 268, 269, 270, 271, 272, 273, 274, 275, 276, 277, 278, 279, 280, 281, 282, 283, 284, 285, 286, 287, 288, 289, 290, 291, 292, 293, 294, 295, 296, 297, 298, 299, 300, 301, 302, 303, 304, 305, 306, 307, 308, 309, 310, 311, 312, 313, 314, 315, 316, 317, 318, 319, 320, 321, 322, 323, 324, 325 and 326 nor (ii) the complement of (i). The —X— and/or —Z— moieties may comprise a promoter sequence (or its complement).

[0081] The invention includes nucleic acid comprising sequences complementary to these sequences (e.g. for antisense or probing, or for use as primers).

[0082] Nucleic acid according to the invention can take various forms (e.g. single-stranded, double-stranded, vectors, primers, probes, labelled etc.). Nucleic acids of the invention may be circular or branched, but will generally be linear. Unless otherwise specified or required, any embodiment of the invention that utilizes a nucleic acid may utilize both the double-stranded form and each of two complementary single-stranded forms which make up the double-stranded form. Primers and probes are generally single-stranded, as are antisense nucleic acids.

[0083] Nucleic acids of the invention are preferably provided in purified or substantially purified form i.e. substantially free from other nucleic acids (e.g. free from naturally-occurring nucleic acids), particularly from other GAS or host cell nucleic acids, generally being at least about 50% pure (by weight), and usually at least about 90% pure. Nucleic acids of the invention are preferably GAS nucleic acids.

[0084] Nucleic acids of the invention may be prepared in many ways e.g. by chemical synthesis (e.g. phosphoramidite synthesis of DNA) in whole or in part, by digesting longer nucleic acids using nucleases (e.g. restriction enzymes), by joining shorter nucleic acids or nucleotides (e.g. using ligases or polymerases), from genomic or cDNA libraries, etc.

[0085] Nucleic acid of the invention may be attached to a solid support (e.g. a bead, plate, filter, film, slide, microarray support, resin, etc.). Nucleic acid of the invention may be labelled e.g. with a radioactive or fluorescent label, or a biotin label. This is particularly useful where the nucleic acid is to be used in detection techniques e.g. where the nucleic acid is a primer or as a probe.

[0086] The term “nucleic acid” includes in general means a polymeric form of nucleotides of any length, which contain deoxyribonucleotides, ribonucleotides, and/or their analogs. It includes DNA, RNA, DNA/RNA hybrids. It also includes DNA or RNA analogs, such as those containing modified backbones (e.g. peptide nucleic acids (PNAs) or phosphorothioates) or modified bases. Thus the invention includes mRNA, tRNA, rRNA, ribozymes, DNA, cDNA, recombinant nucleic acids, branched nucleic acids, plasmids, vectors, probes, primers, etc. Where nucleic acid of the invention takes the form of RNA, it may or may not have a 5′ cap.

[0087] Nucleic acids of the invention comprise sequences, but they may also comprise non-GAS sequences (e.g. in nucleic acids of formula 5′-X—Y—Z-3′, as defined above). This is particularly useful for primers, which may thus comprise a first sequence complementary to a nucleic acid target and a second sequence which is not complementary to the nucleic acid target. Any such non-complementary sequences in the primer are preferably 5′ to the complementary sequences. Typical non-complementary sequences comprise restriction sites or promoter sequences.

[0088] Nucleic acids of the invention may be part of a vector i.e. part of a nucleic acid construct designed for transduction/transfection of one or more cell types. Vectors may be, for example, “cloning vectors” which are designed for isolation, propagation and replication of inserted nucleotides, “expression vectors” which are designed for expression of a nucleotide sequence in a host cell, “viral vectors” which is designed to result in the production of a recombinant virus or virus-like particle, or “shuttle vectors”, which comprise the attributes of more than one type of vector. Preferred vectors are plasmids. A “host cell” includes an individual cell or cell culture which can be or has been a recipient of exogenous nucleic acid. Host cells include progeny of a single host cell, and the progeny may not necessarily be completely identical (in morphology or in total DNA complement) to the original parent cell due to natural, accidental, or deliberate mutation and/or change. Host cells include cells transfected or infected in vivo or in vitro with nucleic acid of the invention.

[0089] Where a nucleic acid is DNA, it will be appreciated that “U” in a RNA sequence will be replaced by “T” in the DNA. Similarly; where a nucleic acid is RNA, it will be appreciated that “T” in a DNA sequence will be replaced by “U” in the RNA.

[0090] The term “complement” or “complementary” when used in relation to nucleic acids refers to Watson-Crick base pairing. Thus the complement of C is G, the complement of G is C, the complement of A is T (or U), and the complement of T (or U) is A. It is also possible to use bases such as I (the purine inosine) e.g. to complement pyrimidines (C or T).

[0091] Nucleic acids of the invention can be used, for example: to produce polypeptides; as hybridization probes for the detection of nucleic acid in biological samples; to generate additional copies of the nucleic acids; to generate ribozymes or antisense oligonucleotides; as single-stranded DNA primers or probes; or as triple-strand forming oligonucleotides.

[0092] The invention provides a process for producing nucleic acid of the invention, wherein the nucleic acid is synthesised in part or in whole using chemical means.

[0093] The invention provides vectors comprising nucleotide sequences of the invention (e.g. cloning or expression vectors) and host cells transformed with such vectors.

[0094] The invention also provides a kit comprising primers (e.g. PCR primers) for amplifying a template sequence contained within an GAS nucleic acid sequence, the kit comprising a first primer and a second primer, wherein the first primer is substantially complementary to said template sequence and the second primer is substantially complementary to a complement of said template sequence, wherein the parts of said primers which have substantial complementarity define the termini of the template sequence to be amplified. The first primer and/or the second primer may include a detectable label (e.g. a fluorescent label).

[0095] For certain embodiments of the invention, nucleic acids are preferably at least 7 nucleotides in length (e.g. 8, 9, 10, 11, 12, 13, 14, 15, 16, 17, 18, 19, 20, 21, 22, 23, 24, 25, 26, 27, 28, 29, 30, 31, 32, 33, 34, 35, 36, 37, 38, 39, 40, 45, 50, 55, 60, 65, 70, 75, 80, 90, 100, 110, 120, 130, 140, 150, 160, 170, 180, 190, 200, 225, 250, 275, 300 nucleotides or longer).

[0096] For certain embodiments of the invention, nucleic acids are preferably at most 500 nucleotides in length (e.g. 450, 400, 350, 300, 250, 200, 150, 140, 130, 120, 110, 100, 90, 80, 75, 70, 65, 60, 55, 50, 45, 40, 39, 38, 37, 36, 35, 34, 33, 32, 31, 30, 29, 28, 27, 26, 25, 24, 23, 22, 21, 20, 19, 18, 17, 16, 15 nucleotides or shorter).

[0097] Primers and probes of the invention, and other nucleic acids used for hybridization, are preferably between 10 and 30 nucleotides in length (e.g. 10, 11, 12, 13, 14, 15, 16, 17, 18, 19, 20, 21, 22, 23, 24, 25, 26, 27, 28, 29, or 30 nucleotides).

### Antisera

[0098] Existing T-typing sera are raised against streptococci that have been treated with trypsin. As shown below, and also in ref. 7, these sera recognise both the Pbp and Pap1 proteins. Because we have shown that T-typing is based on the Pbp protein then it is now possible to provide T-typing sera that recognise Pbp but do not recognise Pap1. Thus the invention provides an antibody that (i) binds to only one of SEQ ID NOs: 1 to 13, and (ii) does not bind to Pap1. The lack of binding to the 13 other Pbp sequences permits T-typing by using this antibody. The lack of binding to Pap1 distinguishes the antibody from existing T-typing sera.

[0099] Antibodies of the invention may be polyclonal or monoclonal. Monoclonal antibodies are particularly useful in identification and purification of the individual polypeptides against which they are directed. Monoclonal antibodies of the invention may also be employed as reagents in immunoassays, radioimmunoassays (RIA) or enzyme-linked immunosorbent assays (ELISA), etc. In these applications, the antibodies can be labelled with an analytically-detectable reagent such as a radioisotope, a fluorescent molecule or an enzyme. The monoclonal antibodies produced by the above method may also be used for the molecular identification and characterization (epitope mapping) of polypeptides of the invention.

[0100] Antibodies of the invention are preferably provided in purified or substantially purified form. Typically, the antibody will be present in a composition that is substantially free of other polypeptides e.g. where less than 90% (by weight), usually less than 60% and more usually less than 50% of the composition is made up of other polypeptides.

[0101] The invention also provides a collection (e.g. in the form of a kit) of a plurality of antibodies, wherein each of said plurality (i) binds to only one of SEQ ID NOs: 1 to 13, (ii) does not bind to Pap1. Preferably the plurality includes at least two antibodies, each of which binds to a different one of SEQ ID NOs: 1 to 13. The collection may further comprise antibodies that do not meet criteria (i) and (ii). The collection may be used for T-typing of GAS e.g. by immunoblot, by FACS, etc.

### Multi Pilus Vaccines

[0102] It has been shown that immunization with pilus components of the three major streptococcal pathogens (GAS, GBS and S. pneumoniae) can confer type-specific protection. A combination of different Pbp proteins may represent a viable vaccine capable of giving broad coverage against the most important strains involved in disease. 12 Pbp variants account for at least 24 of the 27 most prevalent M-types, and so a combination of these variants could protect against 98% of the circulating strains.

[0103] Thus the invention provides a mixture of a plurality of different polypeptides of the invention. A combination of at least two different Pbp variants (e.g. 2, 3, 4, 5, 6, 7, 8, 9, 10, 11, 12 or more) may be used as a vaccine against S. pyogenes disease.

### General

[0104] The term “comprising” encompasses “including” as well as “consisting” e.g. a composition “comprising” X may consist exclusively of X or may include something additional e.g. X+Y.

[0105] The word “substantially” does not exclude “completely” e.g. a composition which is “substantially free” from Y may be completely free from Y. Where necessary, the word “substantially” may be omitted from the definition of the invention.

[0106] The term “about” in relation to a numerical value x means, for example, x+10%.

[0107] Unless specifically stated, a process comprising a step of mixing two or more components does not require any specific order of mixing. Thus components can be mixed in any order. Where there are three components then two components can be combined with each other, and then the combination may be combined with the third component, etc.

[0108] Identity between polypeptide sequences is preferably determined by the Smith-Waterman homology search algorithm as implemented in the MPSRCH program (Oxford Molecular), using an affine gap search with parameters gap open penalty=12 and gap extension penalty=1.

### BRIEF DESCRIPTION OF THE DRAWINGS

[0109] FIG. 1 shows the genetic environment of the pbp gene in different FCT-type strains of GAS.

[0110] FIG. 2 shows how T-sera recognised recombinant Pbp from various strains in western blot.

[0111] FIG. 3 shows the results of a normal T-typing assay for strains classified by their pbp variant type.

[0112] FIG. 4 shows alignments of Pbp genes. FIG. 4A aligns FCT-3 and FCT-4 strains. FIG. 4B aligns FCT-6 and FCT-9 strains. FIG. 4C aligns FCT-1 strains.

[0113] FIG. 5 shows results of PCR using variant-specific primers.

[0114] FIG. 6 shows results of multiplex PCR using a mixture of variant-specific primers.

### MODES FOR CARRYING OUT THE INVENTION

### Sequence Variation in the Pilus Backbone Protein (Pbp)

[0115] Genes coding for the pilus structural components (pbp, pap1 and pap2) were investigated for 57 different GAS strains with a variety of FCT genotypes and M-serotypes. The primers used for PCR amplification of the pilus regions are shown in Table I. The Pbp genes for the 57 strains are SEQ ID NOs: 58 to 114, encoding amino acid sequences SEQ ID NOs: 1 to 57 respectively.

[0116] These 57 sequences were found to group into 15 variants. Prototypic sequences for each variant are SEQ ID NOs: 1 to 15. Table II herein shows the amino acid identity derived from pairwise comparisons between these 15 variants. Within a single M-type the Pbp protein varied by no more than 2/100 amino acids between strains, although the DNA sequence revealed several silent single nucleotide differences. In four cases the same variant was found in different M-types, again with greater than 98% identity.

[0117] Pbp from a M18-type strain (SEQ ID NO: 11) had 90% identity to Pbp from a M49-type strain (SEQ ID NO: 14). Rather than classify these sequences as different variants, immunological cross-reactivity between the strains led to their being classified as a single variant.

[0118] In contrast to the high level of intra-variant amino acid sequence identity, between different Pbp variants there is much less conservation, reaching a maximum of 72% in tested sequences.

[0119] The sequences of the Pap1 protein (SEQ ID NOs 179-216, encoded by SEQ ID NOs 253-290) did not divide as clearly into distinct variants and a wider spread of pairwise identities were observed.

[0120] The sequences of Pap2 protein (SEQ ID NOs 217-252, encoded by SEQ ID NOs 291-326) did not correlate with T-types.

Different Backbone Proteins are Associated with Different T-Serotypes.

[0121] From the analysis of M-types associated with each Pbp variant, we hypothesized that M-types which share the same backbone might also share the same T-serotype, independent of the FCT type carried and ancillary protein sequences.

[0122] 14 pbp genes (SEQ ID NOs: 1 to 14) were cloned and expressed in E. coli and the resulting purified recombinant proteins were tested in immunoblot with each of the 21 commercially available T-typing antisera. The results are summarised in FIG. 2. In most cases each Pbp was recognized by a single T-typing serum, except that the Pbp that reacted with serum T-28 also reacted non-specifically with some other T antisera. The Pbp sequences from M-49 and M-18 types, which have an amino acid identity of 90%, were recognized by the same T serum hence justifying considering these two proteins as a single Pbp variant. In three cases, a single Pbp reacted with more than one T-serum. However, in each case the positive sera belonged to the known families of related T-sera which are usually grouped together (T3/13/B3264, T5/27/44, T8/25/Imp19).

[0123] Thus there is a clear correlation between the T-serotype and specific Pbp variants sharing homology of at least 90%.

[0124] T-antisera also recognised the Pap1 ancillary protein 1, but did not recognise Pap2. Unlike Pbp, though, there was no close correlation between T-type and Pap1 variants.

T-Serotype Agglutination Specificity Correlates with Pbp

[0125] Because of the correlation between T-serotype and Pbp variants in the western blot experiments, the standard agglutination reaction (on which T-typing is based) was performed using various GAS strains which had already been classified according to their Pbp variant. As shown in FIG. 3, a strict correspondence between a Pbp variant and T-agglutination was observed. Thus the sequence of the pbp gene is sufficient to predict the T-type.

[0126] To test this idea, we looked at a strain (M50_{—}4538) that had not been tested in the western blot experiments. Its pbp gene was sequenced and its T-type was predicted. Agglutination confirmed that the prediction was correct.

[0127] T-typing sera 5, 27 and 44 are known to cross-react. These three sera reacted with three strains that, while having different M-types and different pap1 sequences, shared an identical pbp sequence. So far we did not find a pbp protein that reacts with T-typing sera 18 or 22, but the latter occurs in only 1/4000 strains [31].

[0128] Thus, although T-typing sera recognise both the pap1 and the pbp genes, it is the pbp product that determines the T-serotype.

### PCR Detection of Tee-Types

[0129] Bacterial DNA from the following strains was incubated with the relevant PCR primer pairs described above and selected from SEQ ID NOs: 161 to 178. Results of amplification are shown in FIG. 5. Lanes 1 and 20 include molecular weight markers and lane 18 is empty. The other lanes show amplification from strains: (2) 2727; (3) 3789; (4) 20010070; (5) 2728; (6) 20023465; (7) 4538; (8) 6180; (9) 3776/27/44; (10) 5481/27/44; (11) 2724/13; (12) 8232; (13) 2720; (14) SF370; (15) 3040; (16) DS71; (17) 20010012/25; (19) 20010040. Amplification was successful with these primers for these strains.

[0130] A multiplex experiment was also performed, in which a mixture of all primers was used. The results are shown in FIG. 6. Each lane shows results obtained with a single strain. The lanes are ordered by amplicon sizes, which are as follows: 145 bp=M11(2727), M78(3789), M89(20010070); 308 bp=M12(2728), M22(20023465), M50(4538); 395 bp=M28(4436); 530 bp=M5(4883), M44(3776), M44(5481), M77(4959); 685 bp=M3(3040); 767 bp=M18(8232); 865 bp=M9(2720); 1024 bp=M1(SF370); 1144 bp=M6(2724); 1245 bp=M23(DSM2071); 1338 bp=M75(20010012); 1630 bp=M2(20010064); 2151 bp=M4(20010040). FIG. 6 confirms that the primers can amplify their target strains even in the presence of primers for other targets.

[0131] It will be understood that the invention has been described by way of example only and modifications may be made whilst remaining within the scope and spirit of the invention.

### REFERENCES

[0132] [1] Lancefield, R. C., The antigenic complex of Streptococcus hemolyticus. I. Demonstration of a type-specific substance in extracts of Streptococcus hemolyticus. J Exp Med, 1928. 47: p. 9-10.
[0133] [2] Lancefield, R. C. and V. P. Dole, The properties of T antigen extracted from group A hemolytic streptococci. J Exp Med, 1946. 84: p. 449-471.
[0134] [3] Griffith, F., The serological classification of streptococcus pyogenes. J. Hyg., 1934. 34:: p. 542-584.
[0135] [4] Stevens, D. L., M. H. Tanner, J. Winship, R. Swans, K. M. Ries, and a.E.L.K. P. M. Schlivert, Severe group A streptococcal infections associated with a toxic shock-like syndrome and scarlet fever toxin A. N. Engl. J. Med., 1989. 321: p. 1-7.
[0136] [5] Neal, S., et al., International Quality Assurance Study for Characterization of Streptococcus pyogenes. J Clin Microbiol, 2007. 45(4): p. 1175-9.
[0137] [6] Johnson, D. R., et al., Characterization of group A streptococci (Streptococcus pyogenes): correlation of M-protein and emm-gene type with T-protein agglutination pattern and serum opacity factor. J Med Microbiol, 2006. 55(Pt 2): p. 157-64.
[0138] [7] Lizano et al. (2007) J Bacteriol, 189(4):1426-34.
[0139] [8] Schneewind, O., K. F. Jones, and V. A. Fischetti, Sequence and structural characteristics of the trypsin-resistant T6 surface protein of group A streptococci. J Bacteriol, 1990. 172(6): p. 3310-7.
[0140] [9] Mora, M., et al., Group A Streptococcus produce pilus-like structures containing protective antigens and Lancefield T antigens. Proc Natl Acad Sci USA, 2005. 102(43): p. 15641-6.
[0141] [10] Beall et al. (1996) J Clin Microbiol 34:953-8.
[0142] [11] Geysen et al. (1984) PNAS USA 81:3998-4002.
[0143] [12] Carter (1994) Methods Mol Biol 36:207-223.
[0144] [13] Jameson, B A et al. 1988, CABIOS 4(1):181-186.
[0145] [14] Raddrizzani & Hammer (2000) Brief Bioinform 1(2):179-189.
[0146] [15] De Lalla et al., (1999) J. Immunol. 163:1725-1729.
[0147] [16] Brusic et al (1998) Bioinformatics 14(2):121-130
[0148] [17] Meister et al. (1995) Vaccine 13(6):581-591.
[0149] [18] Roberts et al. (1996) AIDS Res Hum Retroviruses 12(7):593-610.
[0150] [19] Maksyutov & Zagrebelnaya (1993) Comput Appl Biosci 9(3):291-297.
[0151] [20] Feller & de la Cruz (1991) Nature 349(6311):720-721.
[0152] [21] Hopp (1993) Peptide Research 6:183-190.
[0153] [22] Welling et al. (1985) FEBS Lett. 188:215-218.
[0154] [23] Davenport et al. (1995) Immunogenetics 42:392-397.
[0155] [24] Bodanszky (1993) Principles of Peptide Synthesis (ISBN: 0387564314).
[0156] [25] Fields et al. (1997) Meth Enzymol 289: Solid-Phase Peptide Synthesis. ISBN: 0121821900.
[0157] [26] Chan & White (2000) Fmoc Solid Phase Peptide Synthesis. ISBN: 0199637245.
[0158] [27] Kullmann (1987) Enzymatic Peptide Synthesis. ISBN: 0849368413.
[0159] [28] Ibba (1996) Biotechnol Genet Eng Rev 13:197-216.
[0160] [29] U.S. Pat. No. 5,707,829
[0161] [30] Current Protocols in Molecular Biology (F. M. Ausubel et al. eds., 1987) Supplement 30.
[0162] [31] Johnson et al. (2006) J Med Microbiol, 55:157-64.

TABLE I

| Strain | Primer | Primer Sequence | SEQ ID |
|---|---|---|---|
| SF37C | Pbp_for | GTGCGTCATATGGCTACAACAGTTCACGG | 115 |
| | Pbp_rev | GCGTCTCGAGAAAGTCTTTTTTATTTGTAAAAGTAATG | 116 |
| | Pap1_for | GTGCGTCATATGGCTAAGACTGTTTTTGGT | 117 |
| | Pap1_rev | GCGTCTCGAGGCCATTGATCTTTTGA | 118 |
| 20010064 | Pbp_for | GTGCGTCATATGGAGGACACCAGAGTGCCT | 119 |
| | Pbp_rev | GCGTCTCGAGTGAAGGACGTTTGTTGTTTTTAACCGA | 120 |
| | Pap1_for | GTGCGTGCTAGCGAAACTCAAGATAACAATCCAGCAC | 121 |
| | Pap1_rev | GCGTCTCGAGAACACTCGGTGGACGTTTTG | 122 |
| 3040 | Pbp_for | GTGCGTCATATGGAGACGGCAGGAGTG | 123 |
| | Pbp_rev | GCGTCTCGAGAGCTTTTTTACGTTTTGTAATATAG | 124 |
| | Pap1_for | GTGCGTGCTAGCGCTGAAGAACAATCAGTG | 125 |
| | Pap1_rev | GCGTCTCGAGAAGATCTTTTCGGTTTTC | 126 |
| 20010040 | Pbp_for | GTGCGTCATATGGAAGCAGAATCATCACATAAAACCGA | 127 |
| | Pbp_rev | GCGTCTCGAGGGTGATTTTTTTGTTAATCACCCGTTG | 128 |
| | Pap1_for | GTGCGTCATATGTTATCAGGACATTCGAGGTCA | 129 |
| | Pap1_rev | GCGTCTCGAGAACAAACTTTTTATTAATAATCTCATTAAATTG | 130 |
| 4883 | Pbp_for | GTGCGTCATATGGAGACGGCAGGGGT | 131 |
| | Pbp_rev | GCGTCTCGAGAGTGTCACGCTTATTTGT | 132 |
| 2724 | Pbp_for | GTGCGTCATATGAAAGATGATACTGCACAACT | 133 |
| | Pbp_rev | GCGTCTCGAGTTCACCTAGCTTGGTGTTAG | 134 |
| | Pap1_for | GTGCGTCATATGTACAGTAGATTGAAGAGAGAGTTAG | 135 |
| | Pap1_rev | GCGTCTCGAGCTGATAAATCTTATAATTTTTAATCATG | 136 |
| 2720 | Ppb_for | GTGCGTCATATGGAGTACTGGTTCAATATTGAATGTTAAG | 137 |
| | Pbp_rev | GCGTCTCGAGAGTGTCACGCTTATTTGTGACTG | 138 |
| | Pap1_for | GTGCGTGCTAGCCAAAGCATATTTGGAGAGGAAAAGAG | 139 |
| | Pap1_rev | ACTCGCTAGCGGCCGCAAGATCTTTTCGGTTTTCAAAAGCTAC | 140 |
| 2728 | Ppb_for | GTGCGTGCTAGCGAGACGGCAGGGGT | 141 |
| | Pbp_rev | GCGTCTCGAGAGTGTCACGGTTATTTG | 142 |
| | Pap1_for | GTGCGTGCTAGCCAAAGCATATTTGGAGAG | 143 |
| | Pap1_rev | GCGTCTCGAGAAGATCTTTACGGTTTTCA | 144 |
| Dsm2071 | Pbp_for | GTGCGTCATATGTTATCAAAAGATGATAAGGCGGAG | 145 |
| | Pbp_rev | GCGTCTCGAGTTCACCTAATTTGGTGTTAGGAATTTC | 146 |
| 6180 | Pbp_for | GTGCGTCATATGACAGCTTCTTTAAATCAAAACGTAAAATCTGAG | 147 |
| | Pbp_rev | GCGTCTCGAGTTGAGTGTCACGGTTATTTGTGAC | 148 |
| | Pap1_for | GTGCGTCATATGGCTCACGAATTGGTTGAGGT | 149 |
| | Pap1_rev | GCGTCTCGAGAAGATCTTTACGGTTTTCAAAAGTGAC | 150 |
| 4538 | Pap1_for | GTGCGTGCTAGCGCTCACGAATTGGTTGAGGTAC | 151 |
| | Pap1_rev | GCGTCTCGAGAAGATCTTTTCGGTTTTCAAAAGTGAC | 152 |
| 20010012 | Pbp_for | GTGCGTCATATGGAGACTTTGCAGGACAGAAC | 153 |
| | Pbp_rev | GCGTCTCGAGTTCAGGACGTTTGTTGTTTTCTAC | 154 |
| 4959 | Ppb_for | GTGCGTCATATGGAGACGGCAGGGGT | 155 |
| | Ppb_rev | GCGTCTCGAGAGTGTCACGCTTATTTGT | 156 |
| | Pap1_for | GTGCGTCATATGGCTGAAGAAAAATCTACTG | 157 |
| | Pap1_rev | GCGTCTCGAGAAGATCTTTTCGGTTTTC | 158 |
| 20010070 | Pbp_for | GTGCGTCATATGGAAGTAAATTATGTAAAATCAGGAGTTATTG | 159 |
| | Pbp_rev | GCGTCTCGAGAGTGTCACGCTTATTTGTGACTG | 160 |

TABLE II

| | | | FCT3 | | | | | | | | | | | | | |
|---|---|---|---|---|---|---|---|---|---|---|---|---|---|---|---|---|
| | | FCT2 | | | M18, | M33, | | FCT4 | | | | FCT6 | FCT5 | FCT1 | | FCT9 |
| | ID % | M1 | M3 | M5, 44, 77 | 49 | 53 | stD33 | M9 | M11, 78, 89 | M12, 22, 50 | M28 | M2 | M4 | M6 | M23 | M75 |
| FCT2 | M1 | 100 | 39 | 39 | 36 | 39 | 38 | 39 | 38 | 40 | 40 | 21 | 23 | 23 | 20 | 24 |
| FCT3 | M3 | | >99 | 64 | 67 | 68 | 67 | 60 | 55 | 61 | 72 | 20 | 24 | 25 | 25 | 27 |
| | M5, 44, 77 | | | >99 | 61 | 69 | 64 | 55 | 50 | 65 | 62 | 25 | 23 | 23 | 25 | 23 |
| | M18, 49 | | | | >90 | 65 | 65 | 58 | 54 | 62 | 65 | 24 | 23 | 24 | 23 | 25 |
| | M33, 53 | | | | | >97 | 63 | 55 | 52 | 64 | 63 | 26 | 23 | 26 | 23 | 30 |
| | stD33 | | | | | | 100 | 56 | 55 | 62 | 81 | 26 | 22 | 24 | 24 | 22 |
| FCT4 | M9 | | | | | | | 100 | 57 | 53 | 56 | 22 | 24 | 27 | 23 | 23 |
| | M11, 78, 89 | | | | | | | | >99 | 51 | 52 | 23 | 20 | 24 | 21 | 26 |
| | M12, 22, 50 | | | | | | | | | >97 | 58 | 26 | 21 | 26 | 23 | 25 |
| | M28 | | | | | | | | | | >99 | 23 | 24 | 23 | 23 | 22 |
| FCT6 | M2 | | | | | | | | | | | 100 | 26 | 21 | 24 | 40 |
| FCT5 | M4 | | | | | | | | | | | | 100 | 24 | 25 | 24 |
| FCT1 | M6 | | | | | | | | | | | | | >99 | 55 | 23 |
| | M23 | | | | | | | | | | | | | | 100 | 24 |
| FCT9 | M75 | | | | | | | | | | | | | | | 100 |

TABLE III
SEQUENCE LISTING AND STRAINS FOR PBP

| SEQ ID | Strain |
|---|---|
| 1 | M1-SF370 |
| 2 | M2-10270 |
| 3 | M3-315 |
| 4 | M4-10750 |
| 5 | M5-Manfredo |
| 6 | M6-10394 |
| 7 | M75-20010012 |
| 8 | M9-2720 |
| 9 | M11-2727 |
| 10 | M12-A735 |
| 11 | M18-8232 |
| 12 | M23-DSM2071 |
| 13 | M28-6180 |
| 14 | M49-591 |
| 15 | M33-29487 |
| 16 | M1-5005 |
| 17 | M12-2096 |
| 18 | M12-9429 |
| 19 | M12-2728* |
| 20 | M12-20010296* |
| 21 | M12-20020069* |
| 22 | M2-20010064 |
| 23 | M2-20010065 |
| 24 | M2-20010194 |
| 25 | M2-20030561 |
| 26 | M22-20020641 |
| 27 | M22-20023465 |
| 28 | M22-20023621 |
| 29 | M28-20010164 |
| 30 | M28-20010218 |
| 31 | M28-20030176 |
| 32 | M28-20030574 |
| 33 | M28-20030902 |
| 34 | M28-4436 |
| 35 | M3-2721 |
| 36 | M3-3040 |
| 37 | M3-SSI |
| 38 | M4-20010040 |
| 39 | M4-20010092 |
| 40 | M4-20030968 |
| 41 | M44-3776 |
| 42 | M44-5481 |
| 43 | M5-4883 |
| 44 | M50-4538 |
| 45 | M53-ALAB49 |
| 46 | M6-2724 |
| 47 | M6-3650 |
| 48 | M6-D471 |
| 49 | M77-4959 |
| 50 | M78-3789 |
| 51 | M89-20010070 |
| 52 | M89-20021915 |
| 53 | M89-20023717 |
| 54 | M89-20030266 |
| 55 | M89-20030382 |
| 56 | STD633-D633 |
| 57 | M1-3348 |

*Partial

1. A method for determining the T-classification of a Streptococcus pyogenes bacterium, wherein the sequence of the bacterium's pbp gene is determined in whole or in part.

2. A method for analysing a Streptococcus pyogenes bacterium, comprising a step in which the sequence of the bacterium's pbp gene is determined in whole or in part.

3. A method for determining the T-classification of a Streptococcus pyogenes bacterium, wherein the sequence, in whole or in part, of the bacterium's pbp gene is compared to one or more known pbp sequence(s) that have been correlated with T serotypes.

4. A kit for analysing a Streptococcus pyogenes bacterium, comprising primers for amplifying a nucleic acid sequence comprising the whole of part of a pbp gene from a Streptococcus pyogenes bacterium.

5. A method for determining if a Streptococcus pyogenes bacterium has a particular T serotype, comprising a step in which the sequence of the bacterium's pbp gene is compared to the sequence of a pbp gene from a Streptococcus pyogenes strain that is known to have the particular T serotype, with a sequence match indicating that the bacterium has the particular T serotype and no sequence match indicating that the bacterium does not have the particular T serotype.

6. A method for determining if a Streptococcus pyogenes bacterium has a particular T serotype, comprising a step in which the bacterium's pbp gene is contacted with a nucleic acid that, under the conditions of this step, gives a first signal when contacted with one of SEQ ID NOs: 58 to 70 and a second signal when contacted with each of the other SEQ ID NOs: 58 to 70, wherein the first and second signals can be distinguished from each other.

7. (canceled)

8. The method of claim 6 wherein the T serotype is T serotype 2.

9. The method of claim 6 wherein the T serotype is T serotype 3/13.

10. The method of claim 6 wherein the T serotype is T serotype 4.

11. The method of claim 6 wherein the T serotype is T serotype 5/27/44.

12. The method of claim 6 wherein the T serotype is T serotype 6.

13. The method of claim 6 wherein the T serotype is T serotype 8 or 25.

14. The method of claim 6 wherein the T serotype is T serotype 9.

15. The method of claim 6 wherein the T serotype is T serotype 11.

16. The method of claim 6 wherein the T serotype is T serotype 12.

17. The method of claim 6 wherein the T serotype is T serotype 14.

18. The method of claim 6 wherein the T serotype is T serotype 23.

19. The method of claim 6 wherein the T serotype is T serotype 3/5/13/28.

20. A kit comprising primers for amplifying a template sequence comprising at least a part of the S. pyogenes pbp gene, the kit comprising a first primer and a second primer, wherein the first primer comprises a sequence substantially complementary to a portion of said template sequence and the second primer comprises a sequence substantially complementary to a portion of the complement of said template sequence, wherein the sequences within said primers which have substantial complementarity define the termini of the template sequence to be amplified.

21. An isolated polypeptide selected from the group consisting of:
a polypeptide comprising an amino acid sequence having at least 50% sequence identity to an amino acid sequence selected from the group consisting of SEQ ID NOs: 1, 2, 4, 6, 7, 8, 9, 10, 11, 12, 14, 15, 16, 17, 18, 19, 20, 21, 22, 23, 24, 25, 26, 27, 28, 29, 30, 31, 32, 33, 34, 35, 36, 37, 38, 39, 40, 41, 42, 43, 44, 45, 46, 47, 48, 49, 50, 51, 52, 53, 54, 55, 56 and 57; and
a polypeptide comprising a fragment of at least 7 consecutive amino acids of an amino acid sequence selected from the group consisting of SEQ ID NOs: 1, 2, 4, 6, 7, 8, 9, 10, 11, 12, 14, 15, 16, 17, 18, 19, 20, 21, 22, 23, 24, 25, 26, 27, 28, 29, 30, 31, 32, 33, 34, 35, 36, 37, 38, 39, 40, 41, 42, 43, 44, 45, 46, 47, 48, 49, 50, 51, 52, 53, 54, 55, 56 and 57.

22. (canceled)

23. An isolated nucleic acid comprising a nucleotide sequence encoding the polypeptides of claim 21.

24. An isolated antibody that (i) binds to only one of SEQ ID NOs: 1 to 13, and (ii) does not bind to Pap 1.

25. A mixture of a plurality of different isolated polypeptides according to claim 21.

26. The method of claim 7 wherein the T serotype is T serotype 1.

The application's sequence listing, which the Patent Office published only in electronic form, follows.

SEQUENCE LISTING (326 sequences)

SEQ ID NO: 1 - protein, 340 aa, Streptococcus pyogenes
MKLRHLLLTGAALTSFAATTVHGETVVNGAKLTVTKNLDLVNSNALIPNTDFTFKIEPDTTVNEDGNKFKGVALNTPMTKVTYTNSDKGGSNTKTAEFDFSEVTFEKPGVYYYKVTEEKIDKVPGVSYDTTSYTVQVHVLWNEEQQKPVATYIVGYKEGSKVPIQFKNSLDSTTLTVKKKVSGTGGDRSKDFNFGLTLKANQYYKASEKVMIEKTTKGGQAPVQTEASIDQLYHFTLKDGESIKVTNLPVGVDYVVTEDDYKSEKYTTNVEVSPQDGAVKNIAGNSTEQETSTDKDMTITFTNKKDFEVPTGVAMTVAPYIALGIVAVGGALYFVKKKNA

SEQ ID NO: 2 - protein, 578 aa, Streptococcus pyogenes
MKLSKKLLYSAVVLATVAGPTVSPVAQFATSGIVVRAEDTRVPSQTQPDKTTVNIYKLQGADFSKQPEGIKNENGEPIDITKLKDTFGTAVTYLPGVKFKYYKVKNYSTSDDVLKSIKTVEQADSKTDLLDVAGAKETEATDQSGKVSIDLPSNDKVKYLFVESSNQDTVNKVVGYTAVPFILHLPVSNSNGKGYYDEVNVYPKNTTVNEPKVDKDVTKLGKDDDTYQIGDKITWFLKSTVPSNIKTLDKFGFTDTLNKGLSFIGDKTQTVTKVQFGTTVLSPDTDYTVEILDSKLTVSLTSAGIEKVSGLVASKQLITEAEKLYKAEDNTDEAAFLSVEVNAKLNADAVMGSRIENDVELDYGHESDIYKSKVPTNEVPEVHTGGARFEKVDATNQTDKLQDAEFGLYSNIEATETVKWTEELLKANEAAINAGKFKESNTTVGTPIIFKSASDGSFEIKGLRYGDDSTNTRSDGTVGTAEKTGKTTYYIKELVAPKGYVVSQDIVQFDVTYSSYYKDPTKVTLGTEAGDAAPTSVKNNKRPSIPNTGGIGTAIFVAIGAAVMAFAAKGMKRRTEEN

SEQ ID NO: 3 - protein, 344 aa, Streptococcus pyogenes
MKKNKLLLATAILATALGTASLNQNVKAETAGVSENAKLIVKKTFDSYTDNEVLMPKADYTFKVEADSTASGKTKDGLEIKPGIVNGLTEQIISYTNTDKPDSKVKSTEFDFSKVVFPGIGVYRYTVSEKQGDVEGITYDTKKWTVDVYVGNKEGGGFEPKFIVSKEQGTDVKKPVNFNNSFATTSLKVKKNVSGNTGELQKEFDFTLTLNESTNFKKDQIVSLQKGNEKFEVKIGTPYKFKLKNGESIQLDKLPVGITYKVNEMEANKDGYKTTASLKEGDGQSKMYQLDMEQKTDESADEIVVTNKRDTQVPTGVVGTLAPFAVLSIVAIGGVIYITKRKKA

SEQ ID NO: 4 - protein, 720 aa, Streptococcus pyogenes
MKTKIFSRLAAVLLVLGSLLPTVVAVAEAESSHKTDVVIHKIKMTSLKGWPKEKNPDGTYTGLGDKNYNGEKIDTITSYFGEGAEELDGVSFTYWSVDKEKYKKLTKNPQNYDTVPKMKAFLQGTEKNKALENSSETIDGKTTGHTADKGGVKVKDLADGYYWFVENSGSNIANGETLSSSAAVPFGLELPVYKADGSTITELHVYPKNTTTKPKIDKNFSKDEKDAALAGGANYDYYQKDKGYVSRIIGSEVSYQIKTEIPAGAQYQTLRWEDTMTKGLTYKAGSLELTITTKGDGKAALNFEFQTDYKLTENQSGFVLKFTESGLEKVKKAVQATKDAKGQVTADGHPMTVDISYKATVNSDAVVDQPDKNTVIFDYSNNPKEHKDPREKSTKPKDKQITVEKTWASQSAPTGIAVTYYLYQKGDESGKDKVVDSVTLTTDYKHIFTNLDDSKDYYVKESAIGYTPEYTEAKDGKISIKNTKDDKNPDPLKPTSPAIVTHGKKFVKTSQDDERLKGATFVVVDQKTNEKYLAIKADEKQSAEEKAYHDTEQKYQDEVKKATTEKPNSQAIEKAKKARDDAFKKARTAYEWVSDKQKAVKFTSNSKGQFEVTGLAAGTYYLEEVAAPTGFAKLQEKVEFTLGFNSYNGHKDQSGQSLEGHTQYEKGTPDFGYGQRVINKKITIPQTGGIGTVIFTVVGLAIMTVTGLMMIRRNKNDKSE

SEQ ID NO: 5 - protein, 352 aa, Streptococcus pyogenes
MEREKMKKNKLLLATAILATALGTASLNQNVKAETAGVVTGKSLQVTKTMTYDDEEVLMPETAFTFTIEPDMTASGKEGSLDIKNGIVEGLDKQVTVKYKNTDKTSQKTKIAQFDFSKVKFPAIGVYRYMVSEKNDKKDGITYDDKKWTVDVYVGNKANNEEGFEVLYIVSKEGTSSTKKPIEFTNSIKTTSLKIEKQITGNAGDRKKSFNFTLTLQPSEYYKTGSVVKIEQDGSKKDVTIGTPYKFTLGHGKSVMLSKLPIGINYYLSEDEANKDGYTTTATLKEQGKEKSSDFTLSTQNQKTDESADEIVVTNKRDTQVPTGVVGTLAPFAVLSIVAIGGVIYITKRKKA

SEQ ID NO: 6 - protein, 556 aa, Streptococcus pyogenes
MTNRRETVREKILITAKKLMLACLAILAVVGLGMTRVSALSKDDTAQLKITNIEGGPTVTLYKIGEGVYNTNGDSFINFKYAEGVSLTETGPTSQEITTIANGINTGKIKPFSTENVSISNGTATYNARGASVYIALLTGATDGRTYNPILLAASYNGEGNLVTKNIDSKSNYLYGQTSVAKSSLPSITKKVTGTIDDVNKKTTSLGSVLSYSLTFELPSYTKEAVNKTVYVSDNMSEGLTFNFNSLTVEWKGKMANITEDGSVMVENTKIGIAKEVNNGFNLSFIYDSLESISPNISYKAVVNNKAIVGEEGNPNKAEFFYSNNPTKGNTYDNLDKKPDKGNGITSKEDSKIVYTYQIAFRKVDSVSKTPLIGAIFGVYDTSNKLIDIVTTNKNGYAISTQVSSGKYKIKELKAPKGYSLNTETYEITANWVTATVKTSANSKSTTYTSDKNKATDNSEQVGWLKNGIFYSIDSRPTGNDVKEAYIESTKALTDGTTFSKSNEGSGTVLLETDIPNTKLGELPSTGSIGTYLFKAIGSAAMIGAIGIYIVKRRKA

SEQ ID NO: 7 - protein, 565 aa, Streptococcus pyogenes
MKLSKKLSKKLLYSAMAFTMLTSATVAPVAQIIPSSTVRAETLQDRTQKTIPEATEVVITKLQADDYNDDVKPNGKANENGLPINNLGELGRNVKPLSDVTFVAYKIPEGIAEEKVKELKTKQTVVDVENYLNAQNLKIEKTVLTKTDGNGQTTFTVQKSSYGKYFVVEDMTATGTPETISKAYAVPFTLELPISASDGTGYLTKVNIYPKNVTSSLPKPGKDVKELGLNHSSYNIGERFSWFLKGTVPKNMLDYEKYSFTDTLDSQLDFISVKSVKYGSQILEKNNDYTLSEPTAQNRTLKVELTEAGIKKVAGLYPDRQEVLDTEIEAIKENTDQKPFLEVEFETNINSTVILGKPVTNEVKIEFDNKPDKIAKPVTTPPSDNPEVHTGGKRFVKVAAGNDATKLGGAEFDLLTEANQPINWTAELIRANNKSEYIVGTPQEGQPVKLKSDTDGSFEIKGLAYAIDAEATGAGVKYKLKETKAPAGYVIPEAPIEFAVNQTSYNKTPTTIDVDKADAEPQKVENNKRPEIPNTGGIGTAIFVVLGIVLMVVATKGMRSHKEEN

SEQ ID NO: 8 - protein, 349 aa, Streptococcus pyogenes
MKKNKLLLATAILAMTLGMASMSQNVKAEGGVSTGSILNVKKTFSSYNDIEVLMPNATFTFKIQADTVKNGEKDKKSGLDIKTGIMGEGLVDQIVTYTNDSKPVDKEKNVNFDFSKVEFPNVGIYRYKVSEEKGNVAGVRYDDKTWTVDVYVVSENGNFIPKYIISTTTENDKKPIVFDNEFTTTSLIVKKQVLGNSGDKTEGFDFTLLLKENSLFEKGKQVSLIKITSDQKEEKVKVTIGEKYDFKLKDGEQVKLDKLPIGINYQVNEKDANTNGYTTTAAILEGNGTSQSYTLDSLKETDLSIDTITVTNKRDTQVPTGVVGTLAPFAVLSIVAIGGVIYITKRKKA

SEQ ID NO: 9 - protein, 351 aa, Streptococcus pyogenes
MKKNKLLLASTILATALGMNNLASAEVNYVKSGVIDGAKLEIHKTIKNYDDDKVLMPNVIFKFNIKPDDSVVAGKKEEKSGLDIKPGIVDGLETSKEVSYTNSDKPNSKDKYTYFDFSQVKFTNVGIYRYVVEEVQDTVSGIHYDSQKWYIDVYVVEGDNGFVPKYIVSSKTLETKEPVLFSNSFDTTSLVVKKEVTGNTGDKTKNFKFQLLLKENAYFSAGQKVSVTITSEKASEVTTATIGQPLIFELKHNEQLKLDKLPVGITYQIDETSKNSDSYTTTATIQEGEQSQNSYVLNSDKETDKSPDIITVTNKRDTQVPTGVVGTLAPFAVLSIVATGGVIYITKRKKA

SEQ ID NO: 10 - protein, 342 aa, Streptococcus pyogenes
MKKNKLLLATAILATALGTASLNQNVKAETAGVVSSGQLTIKKSITNFNDDTLLMPKTDYTFSVNPDSAATGTESNLPIKPGIAVNNQDIKVSYSNTDKTSGKEKQVVVDFMKVTFPSVGIYRYVVTENKGTAEGVTYDDTKWLVDVYVGNNEKGGLEPKYIVSKKGDSATKEPIQFNNSFETTSLKIEKEVTGNTGDHKKAFTFTLTLQPNEYYEASSVVKIEENGQTKDVKIGEAYKFTLNDSQSVILSKLPVGINYKVEEAEANQGGYTTTATLKDGEKLSTYNLGQEHKTDKTADEIVVTNNRDTQVPTGVVGTLAPFAVLSIVAIGGVIYITKRKKA

SEQ ID NO: 11 - protein, 344 aa, Streptococcus pyogenes
MKKNKLLLATAILATALGTASLNQNVKAETAGVIDGSTLVVKKTFPSYTDDKVLMPKADYTFKVEADDNAKGKTKDGLDIKPGVIDGLENTKTIHYGNSDKTTAKEKSVNFDFANVKFPGVGVYRYTVSEVNGNKAGIAYDSQQWTVDVYVVNREDGGFEAKYIVSTEGGQSDKKPVLFKNFFDTTSLKVTKKVTGNTGEHQRSFSFTLLLTPNECFEKGQVVNILQGGETKKVVIGEEYSFTLKDKESVTLSQLPVGIEYKVTEEDVTKDGYKTSATLKDGDVTDGYNLGDSKTTDKSTDEIVVTNKRDTQVPTGVVGTLAPFAVLSIVAIGGVIYITKRKKA

SEQ ID NO: 12 - protein, 549 aa, Streptococcus pyogenes
MREKILIAAKKLMLACLAILAVVGLGMTRVSALSKDDKAELKITNIEGKPTVTLYKIGDGKYSERGDSFIGFELKQGVELNKAKPTSQEINKIANGINKGSVKAEVVNIKEHASTTYSYTTTGAGIYLAILTGATDGRAYNPILLTASYNEENPLKGGQIDATSHYLFGEEAVAKSSQPTISKSITKSTKDGDKDTASVGEKVDYKLTVQLPSYSKDAINKTVFITDKLSQGLTFLPKSLKIIWNGQTLTKVNEEFKAGDKVIAQLKVENNGFNLNFNYDNLDNHAPEVNYSALLNENAVVGKGGNDNNVDYYYSNNPNKGETHKTTEKPKEGEGTGITKKTDKKTVYTYRVAFKKTGKDHAPLAGAVFGIYSDKEAKQLVDIVVTNAQGYAASSEVGKGTYYIKEIKSPKGYSLNTNIYEVETSWEKATTTSTTNRLETIYTTDDNQKSPGTNTVGWLEDGVFYKENPGGDAKLAYIKQSTEETSTTIEVKENQAEGSGTVLLETEIPNTKLGELPSTGSIGTYLFKAIGSAAMIGAIGIYIVKRRKA

SEQ ID NO: 13 - protein, 350 aa, Streptococcus pyogenes
MEREKMKKNKLLLATAILATALGTASLNQNVKSETAGVSENAKLIVKKTFDSYTDNEVLMPKADYTFKVEADSSATDKTKDGLEIKPGVTEGLTTEQTIAYDNSVKPSDKSKTATFDFSTVKFPEVGVYRYTVSEIDSKVSGIKYDTKTWIVDVYVVNDGNGGFKARYIVSKEKGQNDKKPVVFENSFKTTSLKVEKQVTGNTGELKKDFNFTLTINPNDNFVAGQVIKLEKGGIKADVKIGEPYKFALKNGEKVTLSKLPVGVTYSIIEDEADKDGYTTNAKITDGTAAPVEYKLGNQQLADESADEIVVTNNRDTQVPTGVVGTLAPFAVLSIVAIGGVIYITKRKKA

SEQ ID NO: 14 - protein, 344 aa, Streptococcus pyogenes
MKKNKLLLATAILATALGMASMSQNIKAETAGVIDGSTLVVKKTFPSYTDDNVLMPKADYSFKVEADDNAKGKTKDGLDIKPGVIDGLENTKTIRYSNSDKITAKEKSVNFEFANVKFPGVGVYRYTVAEVNGNKAGITYDSQQWTVDVYVVNKEGGGFEVKYIVSTEVGQSEKKPVLFKNSFDTTSLKIEKQVTGNTGEHQRLFSFTLLLTPNECFEKGQVVNILQGGETKKVVIGEEYSFTLKDKESVTLSQLPVGIEYKLTEEDVTKDGYKTSATLKDGEQSSTYELGKDHKTDKSADEIVVTNKRDTQVPTGVVGTLAPFAVLSIVAIGGVIYITKRKKA

SEQ ID NO: 15 - protein, 342 aa, Streptococcus pyogenes
MKKNKLLLATAILATALGTASLNQNVKAETAGVVTGKTLPITKSMIYTDNEILMPKTTFTFTIEPDTTASGKTKDGLEIKSGETTGLTTKAIVSYDNTDKESAKNKTSNFNFETVTFSGIGIYRYTVSEQNDGIEGIQYDGKKWTVDVYVGNKEGGGFEPKYVVSKEVNSDVKKPIRFENSFKTTSLKIEKQVTGNTGELQKDFNFTLILEASALYEKGQVVKIIQDGQTKDVVIGQEYKFTLHDHQSIMLAKLPIGISYKLTEDKADGYTTTATLKEGEIDAKEYVLGNLQKTDESADEIVVTNKRDTQVPTGVVGTLAPFAVLSIVAIGGVIYITKRKKA

SEQ ID NO: 16 - protein, 340 aa, Streptococcus pyogenes; identical to SEQ ID NO: 1

SEQ ID NO: 17 - protein, 347 aa, Streptococcus pyogenes
MEREKMKKNKLLLATAILATALGTASLNQNVKAETAGVVSSGQLTIKKSITNFNDDTLLMPKTDYTFSVNPDSAATGTESNLPIKPGIAVNNQDIKVSYSNTDKTSGKEKQVVVDFMKVTFPSVGIYRYVVTENKGTAEGVTYDDTKWLVDVYVGNNEKGGLEPKYIVSKKGDSATKEPIQFNNSFETTSLKIEKEVTGNTGDHKKAFNFTLTLQPNEYYEASSVVKIEENGQTKDVKIGEAYKFTLNDSQSVILSKLPVGINYKVEEAEANQGGYTTTATLKDGEKLSTYNLGQEHKTDKTADEIVVTNNRDTQVPTGVVGTLAPFAVLSIVAIGGVIYITKRKKA

SEQ ID NO: 18 - protein, 347 aa, Streptococcus pyogenes; identical to SEQ ID NO: 17

SEQ ID NO: 19 - protein, 308 aa, Streptococcus pyogenes
MKKNKLLLATAILATALGTASLNQNVKAETAGVVSSGQLTIKKSITNFNDDTLLMPKTDYTFSVNPDSAATGTESNLPIKPGIAVNNQDIKVSYSNTDKTSGKEKQVVVDFMKVTFPSVGIYRYVVTENKGTAEGVTYDDTKWLVDVYVGNNEKGGLEPKYIVSKKGDSATKEPIQFNNSFETTSLKIEKEVTGNTGDHKKAFNFTLTLQPNEYYEASSVVKIEENGQTKDVKIGEAYKFTLNDSQSVILSKLPVGINYKVEEAEANQGGYTTTATLKDGEKLSTYNLGQEHKTDKTADEIVVTNNRD

SEQ ID NO: 20 - protein, 267 aa, Streptococcus pyogenes
SSGQLTIKKSITNFNDDTLLMPKTDYTFSVNPDSAATGTESNLPIKPGIAVNNQDIKVSYSNTDKTSGKEKQVVVDFMKVTFPSVGIYRYVVTENKGTAEGVTYDDTKWLVDVYVGNNEKGGLEPKYIVSKKGDSATKEPIQFNNSFETTSLKIEKEVTGNTGDHKKAFNFTLTLQPNEYYEASSVVKIEENGQTKDVKIGEAYKFTLNDSQSVILSKLPVGINYKVEEAEANQGGYTTTATLKDGEKLSTYNLGQEHKTDKTADEI

SEQ ID NO: 21 - protein, 267 aa, Streptococcus pyogenes; identical to SEQ ID NO: 20

SEQ ID NO: 22 - protein, 578 aa, Streptococcus pyogenes; identical to SEQ ID NO: 2

SEQ ID NO: 23 - protein, 578 aa, Streptococcus pyogenes; identical to SEQ ID NO: 2

SEQ ID NO: 24 - protein, 578 aa, Streptococcus pyogenes; identical to SEQ ID NO: 2

SEQ ID NO: 25 - protein, 578 aa, Streptococcus pyogenes; identical to SEQ ID NO: 2

SEQ ID NO: 26 - protein, 342 aa, Streptococcus pyogenes
MKKNKLLLATAILATALGTASLNQNVKAETAGVVSSGQLTIKKSITNFNDDTLLMPKTDYTFSVNPDSAATGTESNLPIKPGIAVNNQDIKVSYSNTDKTSGKEKQVVVDFMKVTFPSVGIYRYVVTENKGTAEGVTYDDTKWLVDVYVGNNEKGGLEPKYIVSKKGDSATKEPIQFNNSFETTSLKIEKKVTGNTGDHKKAFNFTLTLQPNEYYEASSVVKIEENGQTKDVKIGEAYKFTLNDSQSVILSKLPVGINYKVEEAEANQGGYTTTATLKDGEKLSTYNLGQEHKTDKTADEIVVTNKRDTQVPTGVVGTLAPFAVLSIVAIGGVIYITKRKKA

SEQ ID NO: 27 - protein, 342 aa, Streptococcus pyogenes; identical to SEQ ID NO: 26

SEQ ID NO: 28 - protein, 342 aa, Streptococcus pyogenes; identical to SEQ ID NO: 26

SEQ ID NO: 29 - protein, 345 aa, Streptococcus pyogenes
MKKNKLLLATAILATALGTASLNQNVKSETAGVSENAKLIVKKTFDSYTDNEVLMPKADYTFKVEADSSATDKTKDGLEIKPGVTEGLTTEQTIAYDNSVKPSDKSKTATFDFSTVKFPEVGVYRYTVSEIDSKVSGIKYDTKTWIVDVYVVNDGNGGFKARYIVSKEKGQNDKKPVVFENSFKTTSLKVEKQVTGNTGELKKDFNFTLTINPNDNFVAGQVIKLEKGGIKADVKIGEPYKFALKNGEKVTLSKLPVGVTYSIIEDEADKDGYTTNAKITDGTAAPVEYKLGNQQLADESADEIVVTNNRDTQVPTGVVGTLAPFAVLSIVAIGGVIYITKRKKA

SEQ ID NO: 30 - protein, 345 aa, Streptococcus pyogenes; identical to SEQ ID NO: 29

SEQ ID NO: 31 - protein, 345 aa, Streptococcus pyogenes; identical to SEQ ID NO: 29

SEQ ID NO: 32 - protein, 345 aa, Streptococcus pyogenes; identical to SEQ ID NO: 29

SEQ ID NO: 33 - protein, 345 aa, Streptococcus pyogenes
MKKNKLLLATAILATALGTASLNQNVKSETAGVSENAKLIVKKTFDSYTDNEVLMPKADYTFKVEADSSATDKTKDGLEIKPGVTEGLTTEQTIAYDNSVKPSDKSKTATFDFSTVKFPEVGVYRYTVSEIDSKVSGIKYDTKTWIVDVYVVNDGNGGFKARYIVSKEKGQNDKKPVVFENSFKTTSLKVEKQVTGNTGEIKKDFNFTLTINPNDNFVAGQVIKLEKGGIKADVKIGEPYKFALKNGEKVTLSKLPVGVTYSIIEDEADKDGYTTNAKITDGTAAPVEYKLGNQQLADESADEIVVTNNRDTQVPTGVVGTLAPFAVLSIVAIGGVIYITKRKKA

SEQ ID NO: 34 - protein, 345 aa, Streptococcus pyogenes; identical to SEQ ID NO: 29

SEQ ID NO: 35 - protein, 344 aa, Streptococcus pyogenes; identical to SEQ ID NO: 3

SEQ ID NO: 36 - protein, 344 aa, Streptococcus pyogenes
MKKNKLLLVTAILATALGTASLNQNVKAETAGVSENAKLIVKKTFDSYTDNEVLMPKADYTFKVEADSTASGKTKDGLEIKPGIVNGLTEQIISYTNTDKPDSKVKSTEFDFSKVVFPGIGVYRYTVSEKQGDVEGITYDTKKWTVDVYVGNKEGGGFEPKFIVSKEQGTDVKKPVNFNNSFATTSLKVKKNVSGNTGELQKEFDFTLTLNESTNFKKDQIVSLQKGNEKFEVKIGTPYKFKLKNGESIQLDKLPVGITYKVNEMEANKDGYKTTASLKEGDGQSKMYQLDMEQKTDESADEIVVTNKRDTQVPTGVVGTLAPFAVLSIVAIGGVIYITKRKKA

SEQ ID NO: 37 - protein, 349 aa, Streptococcus pyogenes
MEREKMKKNKLLLATAILATALGTASLNQNVKAETAGVSENAKLIVKKTFDSYTDNEVLMPKADYTFKVEADSTASGKTKDGLEIKPGIVNGLTEQIISYTNTDKPDSKVKSTEFDFSKVVFPGIGVYRYTVSEKQGDVEGITYDTKKWTVDVYVGNKEGGGFEPKFIVSKEQGTDVKKPVNFNNSFATTSLKVKKNVSGNTGELQKEFDFTLTLNESTNFKKDQIVSLQKGNEKFEVKIGTPYKFKLKNGESIQLDKLPVGITYKVNEMEANKDGYKTTASLKEGDGQSKMYQLDMEQKTDESADEIVVTNKRDTQVPTGVVGTLAPFAVLSIVAIGGVIYITKRKKA

SEQ ID NO: 38 - protein, 720 aa, Streptococcus pyogenes; identical to SEQ ID NO: 4

SEQ ID NO: 39 - protein, 720 aa, Streptococcus pyogenes; identical to SEQ ID NO: 4

SEQ ID NO: 40 - protein, 720 aa, Streptococcus pyogenes; identical to SEQ ID NO: 4

SEQ ID NO: 41 - protein, 352 aa, Streptococcus pyogenes; identical to SEQ ID NO: 5

SEQ ID NO: 42 - protein, 352 aa, Streptococcus pyogenes
MEREKMKKNKLLLATAILATALGTASLNQNVKAETAGVVTGKSLQVTKTMTYDDEEVLMPETAFTFTIEPDMTASGKEGDLDIKNGIVEGLDKQVTVKYKNTDKTSQKTKIAQFDFSKVKFPAIGVYRYMVSEKNDKKDGIRYDDKKWTVDVYVGNKANNEEGFEVLYIVSKEGTSSTKKPIEFTNSIKTTSLKIEKQITGNAGDRKKSFNFTLTLQPSEYYKTGSVVKIEQDGSKKDVTIGTPYKFTLGHGKSVMLSKLPIGINYYLSEDEANKDGYTTTATLKEQGKEKSSDFTLSTQNQKTDESADEIVVTNKRDTQVPTGVVGTLAPFAVLSIVAIGGVIYITRRKRA

SEQ ID NO: 43 - protein, 352 aa, Streptococcus pyogenes
MEREKMKKNKLLLATAILATALGTASLNQNVKAETAGVVTGKSLQVTKTMTYDDEEVLMPETAFTFTIEPDMTASGKEGSLDIKNGIVEGLDKQVTVKYKNTDKTSQKTKIAQFDFSKVKFPAIGVYRYMVSEKNDKKDGIRYDDKKWTVDVYVGNKANNEEGFEVLYIVSKEGTSSTKKPIEFTNSIKTTSLKIEKQITGNAGDRKKSFNFTLTLQPSEYYKTGSVVKIEQDGSKKDVTIGTPYKFTLGHGKSVMLSKLPIGINYYLSEDEANKDGYTTTATLKEQGKEKSSDFTLSTQNQKTDESADEIVVTNKRDTQVPTGVVGTLAPFAVLSIVAIGGVIYITKRKKA

SEQ ID NO: 44 - protein, 342 aa, Streptococcus pyogenes
  VARIANT (1)...(342): Xaa = Any Amino Acid
MKKNKLLLATAILATALGTASLNQNVKAETAGVVSSGQLTIKKSITNFNDDTLLMPKTDYTFSVNPDSAATGTESNLPIKPGIAVNNQDIKVSYSNTDKTSGKEKQVVVDFMKVTFPSVGIYRYVVTENKGTAEGVTYDDTKWLVDVYVGNNEKGGLEPKYIVSKKGDSATKEPIQFNNSFETTSLKIEKKVTGNTGDHKKAFNFTLTLQPNEYYEASSVVKIEENGQTKDVKIGEAYKFTLNDSQSVILSKLPVGINYKVEEAEANQGGYTTTATLKDGEKLSTYNLGQEHKTDKTADEIVVTNXRDTXVPTGVVGTPPPFXVLXIXAXGGVXYXTKRKKX

SEQ ID NO: 45 - protein, 315 aa, Streptococcus pyogenes
MKKNKLLLATAILATALGTASLNQNVKAETAGVVTGKTLPITKSMIYTDNEILMPKTTFTFTIEPDTTASGKTKDGLEIKSGETTGLTTKAIVSYDNTDKESAKNKTSNFNFETVTFSGIGIYRYTVSEQNDGIEGIQYDGKKWTVDVYVGNKEGGGFEPKYVVSKEVNSDVKKPIRFENSFKTTSLKIEKQVTGNTGELQKDFNFTLILEASALYEKGQVVKIIQDGQTKDVVIGQEYKFTLHDHQSIMLAKLPIGISYKLTEDKADGYTTTATLKEGEIDAKEYVLGNLQKTTNLLTKSLSQISVTLKFQLVL

SEQ ID NO: 46 - protein, 556 aa, Streptococcus pyogenes; identical to SEQ ID NO: 6

SEQ ID NO: 47 - protein, 556 aa, Streptococcus pyogenes
  VARIANT (1)...(556): Xaa = Any Amino Acid
MTNRRETVREKILITAKKLMLACLAILAVVGLGMTRVSALSKDDTAQLKITNIEGGPTVTLYKIGEGVYNTNGDSFINFKYAEGVSXTETGPTSQEITTIANGINTGKIKPFSTENVSISNGTATYNARGASVYIALLTGATDGRTYNPILLAASYNGEGNLVTKNIDSKSNYLYGQTSVAKSSLPSITKKVTGTIXDVNKKTTSLGSVLSYSLTFELPSYTKEAVNKTVYVSDNMSEGLTFNFNSLTVEWKGKMANITEDGSVMVENTKIGIAKEVNNGFNLSFIYDSLESISPNISYKAVVNNKAIVGEEGNPNKAEFFYSNNPTKGNTYDNLDKKPDKGNGITSKEDSKIVYTYQIAFRKVDSVSKTPLIGAIFGVYDTSNKLIDIVTTNKNGYAISTQVSSGKYKIKELKAPKGYSLNTETYEITANWVTATVKTSANSKSTTYTSDKNKATDNSEQVGWLKNGIFYSIDSRPTGNDVKEAYIESTKALTDGTTFSKSNEGSGTVLLETDIPNTKLGELPSTGSIGTYLFKAIGSAAMIGAIGIYIVKRRKA

SEQ ID NO: 48 - protein, 537 aa, Streptococcus pyogenes
MLACLAILAVVGLGMTRVSALSKDDTAQLKITNIEGGPTVTLYKIGEGVYNTNGDSFINFKYAEGVSLTETGPTSQEITTIANGINTGKIKPFSTENVSISNGTATYNARGASVYIALLTGATDGRTYNPILLAASYNGEGNLVTKNIDSKSNYLYGQTSVAKSSLPSITKKVTGTIDDVNKKTTSLGSVLSYSLTFELPSYTKEAVNKTVYVSDNMSEGLTFNFNSLTVEWKGKMANITEDGSVMVENTKIGIAKEVNNGFNLSFIYDSLESISPNISYKAVVNNKAIVGEEGNPNKAEFFYSNNPTKGNTYDNLDRKPDKGNGITSKEDSKIVYTYQIAFRKVDSVSKTPLIGAIFGVYDTSNKLIDIVTTNKNGYAISTQVSSGKYKIKELKAPKGYSLNTETYEITANWVTATVKTSANSKSTTYTSDKNKATDNSEQVGWLKNGIFYSIDSRPTGNDVKEAYIESTKALTDGTTFSKSNEGSGTVLLETDIPNTKLGELPSTGSIGTYLFKAIGSAAMIGAIGIYIVKRRKA

SEQ ID NO: 49 - protein, 214 aa, Streptococcus pyogenes
  VARIANT (1)...(214): Xaa = Any Amino Acid
MTVKYKNTDKTSQKTKIAQFDFSKVKFPAIGVYRYMVSEKNDKKDGITYDDKKWTVDVYVGNKANNEEGFEVLYIVSKEGTSSXKKPIEFTNSIKTTSLKIEKQITGNAGDRKKSFNFTXTLXPSEYYKTGSVVKIEQDGSKKDVTIGTPYKFTLGHGKSVMLSKXPIGINYYLSEDEANKDGYTTXATLKEQGKEKSSDFTLSTQNQKTDESA

SEQ ID NO: 50 - protein, 351 aa, Streptococcus pyogenes
MKKNKLLLASTILATALGMNNLASAEVNYVKSGVIDGAKLEIHKTIKNYDDDKVLMPNVIFKFNIKPDDSVVAGKKEEKSGLDIKPGIVDGLETSKEVSYTNSDKPNSKDKYTYFDFSQVKFTNVGIYRYIVEEVQDTVSGIHYDSQKWYIDVYVVEGDNGFVPKYIVSSKALETKEPVLFSNSFDTTSLVVKKEVTGNTGDKTKNFKFQLLLKENAYFSAGQKVSVTITSEKASEVTTATIGQPLIFELKHNEQLKLDKLPVGITYQIDETSKNSDSYTTTATIQEGEQSQNSYVLNSDKETDKSPDIITVTNKRDTQVPTGVVGTLAPFAVLSIVAIGGVIYITKRKKA

SEQ ID NO: 51 - protein, 351 aa, Streptococcus pyogenes; identical to SEQ ID NO: 9

SEQ ID NO: 52 - protein, 351 aa, Streptococcus pyogenes; identical to SEQ ID NO: 9

SEQ ID NO: 53 - protein, 351 aa, Streptococcus pyogenes; identical to SEQ ID NO: 9

SEQ ID NO: 54 - protein, 351 aa, Streptococcus pyogenes; identical to SEQ ID NO: 9

SEQ ID NO: 55 - protein, 351 aa, Streptococcus pyogenes; identical to SEQ ID NO: 9

SEQ ID NO: 56 - protein, 346 aa, Streptococcus pyogenes
MKKNKLLLAIAILATALGTASLNQNIKAETAGVTNGTQLTIKKTIANYNDSEVLMPKATFTFEVKPDNSVTGVEKTVDGLTIKAGIAEGLVKTGNVEYSNTDKVENKDKTTTFDFSTVKFPEVGVYRYTVSETDSKVSGIKYDTKTWIVDVYVVNDGNGGFKAQYIVSKEKGQNDKKPVVFENSFKTTSLKVEKQVTGNTGELKKDFNFTLTINPNDNFVAGQVIKLEKGGIKADVKIGEPYKFALKNGEKVTLSKLPVGITYSIIEDDAGKDGYKTTAILKDGEQSSTYELGKNQKTDESADEIVVTNKRDTQVPTGVVGTLAPFAVLSIVAIGGVIYITKRKKA

SEQ ID NO: 57 - protein, 340 aa, Streptococcus pyogenes; identical to SEQ ID NO: 1

SEQ ID NO: 58 - DNA, 1023 bp, Streptococcus pyogenes
atgaaattacgtcacttactattaacgggagcagccctaactagttttgctgctacaacagttcacggggagactgttgtaaacggagccaaactaacagttacaaaaaaccttgatttagttaatagcaatgcattaattccaaatacagattttacatttaaaatcgaacctgatactactgtcaacgaagacggaaataagtttaaaggtgtagctttgaacacaccgatgactaaagtcacttacaccaattcagataaaggtggatcaaatacgaaaactgcagaatttgatttttcagaagttacttttgaaaaaccaggtgtttattattacaaagtaactgaggagaagatagataaagttcctggtgtttcttatgatacaacatcttacactgttcaagttcatgtcttgtggaatgaagagcaacaaaaaccagtagctacttatattgttggttataaagaaggtagtaaggtgccaattcagttcaaaaatagcttagattctactacattaacggtgaagaaaaaagtttcaggtaccggtggagatcgctctaaagattttaattttggtctgactttaaaagcaaatcagtattataaggcgtcagaaaaagtcatgattgagaagacaactaaaggtggtcaagctcctgttcaaacagaggctagtatagatcaactctatcattttaccttgaaagatggtgaatcaatcaaagtcacaaatcttccagtaggtgtggattatgttgtcactgaagacgattacaaatcagaaaaatatacaaccaacgtggaagttagtcctcaagatggagctgtaaaaaatatcgcaggtaattcaactgaacaagagacatctactgataaagatatgaccattacttttacaaataaaaaagactttgaagtgccaacaggagtagcaatgactgtggcaccatatattgctttaggaattgtagcagttggtggagctctttactttgttaaaaagaaaaatgcttaa

SEQ ID NO: 59 - DNA, 1737 bp, Streptococcus pyogenes
atgaaattgtcaaagaagttgttgtattcagctgttgtgttagctacggtagcgggaccaactgttagcccagttgcacagtttgcgacaagtggaattgttgtaagagctgaggacaccagagtgccttctcaaactcaaccagataagacaactgtcaatatctataaattacaaggggctgatttttcaaaacaacctgaaggaattaagaacgaaaatggagaaccaatagatattactaaactgaaggatacttttggtacagccgtcacatatttgccaggtgtgaaatttaaatattataaagtaaaaaattattcaacctcagatgatgttttgaaaagtataaaaacagtagagcaagctgatagtaagacagacttattggatgttgcaggcgcaaaggaaactgaagcaactgatcaaagtggtaaagttagcattgaccttccatcaaatgataaagttaagtatctgtttgttgaatcttccaatcaagatactgtgaacaaggtagttggatatacggcggttccgtttattttgcatttaccagtatctaatagtaacgggaaaggatattatgacgaggttaacgtataccctaaaaatacaacagttaatgaacctaaagtcgataaagacgttactaaattagggaaagatgacgatacttaccaaattggtgataaaatcacatggtttttgaaatcaacagtcccatcaaatatcaagacgttagataagttcggattcacagatacattgaataagggattgtcttttatcggcgataaaacgcaaacagttactaaagttcaatttggtaccacagtacttagccccgatactgattacactgttgaaattttagattctaaattaacagtatcattgacatcagctggaattgaaaaggtttcaggtttggttgcatcaaaacaattgattaccgaggctgaaaaactttataaagcagaggataatacagatgaagcagcattcttatcagttgaagttaacgcaaaactaaatgcagatgctgtaatgggaagtcgtatcgaaaatgatgttgaacttgattatggacatgaatcggatatctataaatcaaaagttcctaccaatgaagttcctgaagtgcatacaggtggtgcaagattcgaaaaagttgatgcaacaaatcaaactgataaattgcaagatgcagaattcggattatatagtaatatcgaagcaacagaaactgtaaaatggacagaggaattgttgaaagcaaatgaagcagcaattaatgcaggaaagtttaaagaaagcaataccaccgtaggaactccaattattttcaaatctgcgtcagatggttcatttgaaattaaaggtcttagatatggtgatgattccaccaatacacgttctgatggcacagttggtacagctgaaaaaactggtaaaacaacttactatatcaaagagctagttgctcctaaaggttatgtggtttcacaagatattgttcaatttgatgtaacttatagtagctattataaagatccaacaaaagtaactttaggaactgaagcaggtgatgctgctcctacctcggttaaaaacaacaaacgtccttcaatccctaatactggtggtattggtacggctatctttgtcgctatcggtgctgcggtgatggcttttgctgctaagggtatgaaacgtcgtacagaagaaaactaa

SEQ ID NO: 60 - DNA, 1035 bp, Streptococcus pyogenes
atgaaaaaaaacaaattattacttgctactgcaatcttagcaactgctttaggaacagcttctttaaatcaaaacgtaaaagctgagacggcaggagtgtccgaaaatgcaaaattaatagtaaaaaagacatttgactcttatacagacaatgaagttttaatgccaaaagctgattatacttttaaagtagaggcagatagtacagctagtggcaaaacgaaagacggtttagagattaagccaggtattgttaatggtttaacagaacagattatcagctatactaatactgataaaccagatagtaaagttaaaagtacagagtttgatttttcaaaagtagtattccctggtattggtgtttaccgctatactgtttcagaaaaacaaggtgatgttgaaggaattacctacgatactaagaagtggacagtagatgtttatgttggaaacaaagaaggtggtggttttgaacctaagtttattgtatctaaggaacaaggaacagacgtcaaaaaaccagttaattttaacaactcgtttgcaactacttcgttaaaagttaagaagaatgtatcggggaatactggagaattgcaaaaagaatttgactttacattgacgcttaatgaaagcacgaattttaaaaaagatcaaattgtttctttacaaaaaggaaacgagaaatttgaagttaagattggtactccctacaagtttaaactcaaaaatggggaatctattcaactagacaagttaccagttggtattacttataaagtcaatgaaatggaagctaataaagatgggtataaaacaacagcatccttgaaagagggagatggtcaatctaaaatgtatcaattggatatggaacaaaaaacagacgaatctgctgacgaaatcgttgtcacaaataagcgtgacactcaagttccaactggtgttgtaggcacccttgctccatttgcagttcttagcattgtggctattggtggagttatctatattacaaaacgtaaaaaagcttaa

SEQ ID NO: 61 - DNA, 2163 bp, Streptococcus pyogenes
ttgaaaacgaagatatttagtagattggcagcagtattactggttttgggaagccttttaccgacagttgtagctgtggcagaagcagaatcatcacataaaaccgatgttgttattcataaaatcaaaatgacgagcttaaaaggctggccaaaagaaaaaaatccggatgggacttatacaggacttggtgataagaattataatggtgaaaaaattgatacaataacgagttattttggtgaaggtgctgaggaacttgatggtgttagttttacttactggagtgtagacaaagaaaagtataagaagttaactaaaaatcctcaaaactacgatacggtaccaaaaatgaaagcattcttacaaggtactgagaaaaataaagctctagagaactcttcggaaactattgacgggaagaccactggtcatactgctgataaaggtggcgtcaaagttaaggatcttgcagatggttactattggtttgtcgaaaattcgggttccaatattgcgaatggagagaccttgtcttctagtgcggctgttccatttggattggagttacctgtttataaggctgatggatcaactataacagagttacatgtatatcctaagaataccacaacgaagcctaaaattgataagaattttagtaaagatgaaaaagatgcagcactagcaggtggagctaattatgattattatcaaaaggataagggttatgtttcacgtataattggttcagaagtttcttatcaaattaaaacagagattccagctggtgcacagtatcagacccttcgatgggaagacacgatgactaaaggtttgacttataaagctgggagtttagagctaactatcacaacaaagggtgatgggaaagctgccctgaactttgagtttcaaacagattataaactaacagaaaatcaaagtggatttgtcttgaaattcactgaatcgggtctagaaaaagttaaaaaagctgttcaagcaactaaggacgctaagggtcaagttacagctgatggtcacccaatgacagtggatataagctataaagcgactgtcaatagcgatgccgtcgttgaccaaccagacaagaatacagttatctttgattacagcaacaatcctaaagaacataaagacccaagagaaaagtctacaaaaccgaaagataaacaaatcactgttgaaaaaacatgggctagtcaatcagcaccaacaggtattgcagtgacctactacctttaccaaaaaggtgatgagtctggtaaggataaggtggtggattcagtcacattgactacagattataagcacatctttacaaacttagatgactccaaggactactatgtaaaagaaagtgccattggttacacaccagagtacactgaagctaaagatggaaaaatttccatcaagaacaccaaagatgataaaaatccagatcctcttaaaccaactagtccagcaattgtaacacatggtaaaaaattcgttaaaactagtcaagacgacgaacgtctaaaaggagccacctttgttgtagtagatcaaaaaactaatgagaaatacttagccattaaagccgatgaaaagcagtctgctgaagaaaaagcataccacgacacagagcaaaaatatcaagacgaagtcaaaaaagctactacagaaaaacctaattctcaagcaattgaaaaagctaaaaaagcgcgtgacgatgccttcaaaaaagcaagaactgcttatgaatgggtaagtgataaacaaaaagcagtcaaattcacgtcaaatagtaaaggacagtttgaggtaacagggcttgcagctggaacctattacttagaagaggtagcagctcctactggctttgcaaaacttcaagaaaaggttgagtttacacttggtttcaactcttacaatgggcataaagatcaatctggtcaaagtttggaagggcatactcaatatgaaaaaggaacacctgattttggttacggacaacgggtgattaacaaaaaaatcaccattcctcaaactggtggtattggtacagttatctttactgtggttggtttggcaatcatgaccgttactggattgatgatgatccgtcgtaataaaaatgataaatcggaatag

SEQ ID NO: 62 - DNA, 1059 bp, Streptococcus pyogenes
ttggagagagaaaaaatgaaaaaaaacaaattattacttgctactgcaatcttagcaactgctttaggaacagcttctttaaatcaaaacgtaaaagctgagacggcaggggttgtaacaggaaaatcactacaagttacaaagacaatgacttatgatgatgaagaggtgttaatgcccgaaaccgcctttacttttactatagagcctgatatgactgcaagtggaaaagaaggcagcctagatattaaaaatggaattgtagaaggcttagacaaacaagtaacagtaaaatataagaatacagataaaacatctcaaaaaactaaaatagcacaatttgatttttctaaggttaaatttccagctataggtgtttaccgctatatggtttcagagaaaaacgataaaaaagacggaattacgtacgatgataaaaagtggactgtagatgtttatgttgggaataaggccaataacgaagaaggtttcgaagttctatatattgtatcaaaagaaggtacttctagtactaaaaaaccaattgaatttacaaactctattaaaactacttccttaaaaattgaaaaacaaataactggcaatgcaggagatcgtaaaaaatcattcaacttcacattaacattacaaccaagtgaatattataaaactggatcagttgtgaaaatcgaacaggatggaagtaaaaaagatgtgacgataggaacgccttacaaatttactttgggacacggtaagagtgtcatgttatcgaaattaccaattggtatcaattactatcttagtgaagacgaagcgaataaagacggctacactacaacggcaacattaaaagaacaaggcaaagaaaagagttccgatttcactttgagtactcaaaaccagaaaacagacgaatctgctgacgaaatcgttgtcacaaataagcgtgacactcaagttccaactggtgttgtagggacccttgctccatttgcagttcttagcattgtggctattggtggagttatctatattacaaaacgtaaaaaagcttaa

SEQ ID NO: 63 - DNA, 1671 bp, Streptococcus pyogenes
ttgacaaacaggagagaaacagtgagagagaagatattaataacagcaaaaaaactaatgctagcttgtttagctatcttagcggtagtagggcttggaatgacaagagtatcagctttatcaaaagatgatactgcacaactaaagataacaaatattgaaggtgggccaacagtaacactttataaaataggagaaggtgtttacaacactaatggtgattcttttattaactttaaatatgctgagggggtttctttaactgaaacaggacctacatcacaagaaattactactattgcaaatggtattaatacgggtaaaataaagccttttagtactgaaaacgttagtatttctaatggaacagcaacttataatgcgagaggtgcatctgtttatattgcattattaacaggtgcgacagatggccgtacctacaatcctattttattagctgcatcttataatggtgagggaaatttagttactaaaaatattgattccaaatctaattatttatatggacaaacaagtgttgcaaaatcatcattaccatctattacaaagaaagtaaccgggacaatagatgacgtgaataaaaagactacctcgttaggaagtgtattgtcttattcgctgacatttgaattaccaagttataccaaagaagcagtcaataaaacagtatatgtttctgataatatgtcggaaggtcttacttttaactttaatagtcttacagtagaatggaaaggtaagatggctaatattactgaagatggttcagtaatggtagaaaatacaaaaatcggaatagctaaggaggttaataacggttttaatttaagttttatttatgatagtttagaatctatatcaccaaatataagttataaagctgttgtaaacaataaagctattgttggtgaagagggtaatcctaataaagctgaattcttctattcaaataatccaacaaaaggtaatacatacgataatttagataagaagcctgataaagggaatggtattacatccaaagaagattctaaaattgtttatacttatcaaatagcgtttagaaaagttgatagtgttagtaagaccccacttattggtgcaatttttggagtttatgatactagtaataaattaattgatattgttacaaccaataaaaatggatatgctatttcaacacaagtatcttcaggaaaatataaaattaaggaattaaaagctcctaaaggttattcattgaatacagaaacttatgaaattacggcaaattgggtaactgctacagtcaagacaagtgctaattcaaaaagtactacttatacatctgataaaaataaggcgacagataattcagagcaagtaggatggttaaaaaatggtatattctattctatagatagtagacctacaggaaatgatgttaaagaggcttatattgaatctactaaggctttaactgatggaacaactttctcaaaatcgaatgaaggttcaggtacagtattattagaaactgacatccctaacaccaagctaggtgaattaccttcgacaggtagcattggtacttacctctttaaagctattggttcggctgctatgattggtgcaattggtatttatattgttaaacgtcgtaaagcttaa

SEQ ID NO: 64 - DNA, 1698 bp, Streptococcus pyogenes
atgaaattgtcaaagaaattatcaaagaaattattgtattcggcaatggcttttaccatgctgacaagtgccactgttgcaccagttgctcagattataccaagtagtacggtaagggcggagactttgcaggacagaacacaaaaaacgattccagaagcaacagaagttgtcattactaaattacaggcagatgactataatgatgatgtgaaaccaaatggaaaagcaaacgaaaatggactgccaattaataatttgggagagttaggaagaaatgtaaagccgctttcagatgttacatttgtggcatataagataccagagggtatagccgaagaaaaagttaaagaactaaaaactaaacagacagtagtagatgtagagaactatttgaatgcacaaaatctcaaaattgagaaaactgtattaactaaaacagatggaaatggtcaaactacatttacagttcaaaaatctagctatgggaaatactttgtagttgaagatatgactgctactggaacaccagagacaatctcgaaagcctatgctgtaccgtttactttggaacttcccatatctgcttcagatggcacaggttatttaactaaagttaatatctatcctaaaaatgttacttctagtcttccaaaaccgggtaaggatgtcaaagagcttggattaaatcactctagctacaatataggagagagattttcttggtttttaaaaggaactgttccgaagaatatgctcgattatgagaaatatagttttactgatacattagattctcagcttgattttataagcgttaaatctgttaaatatggttcacaaatacttgagaagaataatgattacactctttctgaaccaacggctcaaaataggacactgaaagttgagttaacagaagctggtattaaaaaagtagctggtttgtatcctgatagacaagaagttttagatacagaaattgaagctattaaagaaaatacagatcaaaaaccttttttagaggtagagttcgagactaatatcaattcaacagttatcttagggaagccagttactaacgaagttaagattgaatttgataataaacctgataagattgctaaaccagtaaccactcctccttcagataatcctgaagttcatacaggtggaaaacgttttgtaaaggtggccgcagggaatgacgccactaaacttggtggtgcagagtttgatttgttaacggaagcaaatcaaccaatcaattggactgctgaattaattagagctaataataaatcagaatatattgttggcactcctcaagaaggtcaaccagttaaactaaaatcagatacggatggttcttttgaaattaaaggtttagcgtatgctattgatgcagaagctacgggagcaggagttaaatataaattaaaagaaacaaaagcaccagcaggatatgtcattcctgaagcgcctattgagtttgctgtgaatcaaacatcttacaataagactccaactaccatagatgttgataaggccgatgcggagcctcaaaaggtagaaaacaacaaacgtcctgaaattccaaatactgggggtattggtacggctatctttgttgtgctagggattgttctgatggtagttgctactaagggtatgagaagtcacaaagaagaaaactaa

SEQ ID NO: 65 - DNA, 1050 bp, Streptococcus pyogenes
atgaaaaaaaataaattattacttgctactgcaatcttagcgatgactttaggaatggcttcaatgagtcaaaacgtgaaggcggaaggtggagtgagtactggttcaatattgaatgttaagaaaactttttcaagttataatgatattgaagtgttgatgccgaatgctacttttacatttaaaattcaagcagatactgtgaaaaatggtgaaaaagataaaaagtcaggattagatattaagacaggtatcatgggagaaggactagttgatcaaatagttacatatactaatgacagtaaacctgttgataaagagaaaaatgtaaattttgatttttctaaagtggaatttcctaatgtaggtatttatagatacaaagtctcagaggaaaaaggaaatgtcgctggtgttaggtatgatgataaaacttggacagtagatgtatatgttgttagtgagaatggtaattttattcctaaatatattatttcaacgacaacagaaaatgataaaaaaccgattgtttttgacaacgaatttacaacaacatctctaattgtgaaaaaacaagttttagggaacagcggtgataaaacagaaggttttgattttactctcttattaaaagaaaatagtctctttgagaagggtaaacaagtttctttaattaaaataacatctgatcaaaaagaagagaaggtcaaagtaactatcggagaaaagtatgatttcaaactaaaagatggtgaacaagttaagttagataagttacctattggtattaattatcaagtgaatgaaaaagatgccaatactaatggttatactacaactgcggctattttagaaggcaatggcacatcacaatcttacacattagattcattgaaggaaacagatctatcaattgatactattacagtcacaaataagcgtgacactcaagttccaactggtgttgtagggacccttgctccatttgcagttcttagcattgtggctattggtggagttatctatattacaaaacgtaaaaaagcttaa

SEQ ID NO: 66 - DNA, 1056 bp, Streptococcus pyogenes
atgaaaaaaaacaaattattacttgcaagtacaattttggctactgctttgggaatgaataatttagcatcagctgaagtaaattatgtaaaatcaggagttattgatggtgcaaagttagaaatccataaaacaattaagaattatgatgatgataaagttttaatgccaaatgtgattttcaagtttaatattaagccagatgattcagttgttgctggtaaaaaagaagaaaaatcgggattagatataaaaccaggtatagttgatgggttggaaactagtaaggaagtatcttatacaaatagcgacaaaccaaatagtaaagataaatatacttactttgatttttctcaagtgaaatttactaatgttggtatctatcgctatattgttgaagaagtacaggatacagtatccggtattcattatgatagtcaaaaatggtatatagacgtttatgttgttgaaggagataatggattcgttccgaaatatattgtatcaagtaaagcattggaaactaaagaaccagttttatttagtaattcatttgatacaacttctttagttgttaaaaaagaggttacaggaaatactggagataaaacgaaaaactttaaattccaattattattaaaagagaatgcttatttctcagcaggtcaaaaagtttcagttacaataacttctgagaaagcttcagaagtcacgactgctaccataggtcaaccacttatctttgagttaaaacacaatgaacaacttaaattggataaattgcctgttggtattacgtatcaaattgatgaaactagtaaaaatagtgacagctacacaacgactgctacaattcaagaaggtgaacaatcacaaaattcttatgttttaaactcagataaggaaactgataaaagtccagatattattacagtcacaaataagcgtgacactcaagttccaactggtgttgtaggcacccttgctccatttgcagttcttagcattgtggctattggtggagttatctatattacaaaacgtaaaaaagcttaa

SEQ ID NO: 67 - DNA, 1029 bp, Streptococcus pyogenes
atgaaaaaaaataaattattacttgctactgcaatcttagcaactgctttaggaacagcttctttaaatcaaaacgtaaaagctgagacggcaggggttgttagcagtggtcaattaacaataaaaaaatcaattacaaattttaatgatgatacacttttgatgcctaagacagactatacttttagcgttaatccggatagtgcggctacaggtactgaaagtaatttaccaattaaaccaggtattgctgttaacaatcaagatattaaggtttcttattctaatactgataagacatcaggtaaagaaaaacaagttgttgttgactttatgaaagttacttttcctagcgttggtatttaccgttatgttgttaccgagaataaagggacagcagaaggagttacatatgatgatacaaaatggttagttgacgtctatgttggtaataatgaaaagggaggtcttgaaccaaagtatattgtatctaaaaaaggagattctgctactaaagaaccaatccagtttaataattcattcgaaacaacgtcattaaaaattgaaaaggaagttactggtaatacaggagatcataaaaaagcatttacctttacattaacattgcaaccaaatgaatactatgaggcaagttcggttgtgaaaattgaagagaacggacaaacgaaagatgtgaaaattggggaggcatataagtttactttgaacgatagtcagagtgtgatattgtctaaattaccagttggtattaattataaagttgaagaagcagaagctaatcaaggtggatatactacaacagcaactttaaaagatggagaaaagttatctacttataacttaggtcaggaacataaaacagacaagactgctgatgaaatcgttgtcacaaataaccgtgacactcaagttccaactggtgttgtaggcacccttgctccatttgcagttcttagcattgtggctattggtggagttatctatattacaaaacgtaaaaaagcttaa

SEQ ID NO: 68 - DNA, 1035 bp, Streptococcus pyogenes
atgaaaaaaaacaaattattacttgctactgcaatcttagcaactgctttaggaacagcttctttaaatcaaaacgtaaaagctgagacagcaggagtgattgatggttcaacattagtagttaaaaaaacattcccatcttatactgatgataaagttttaatgccaaaagctgattatacttttaaagtagaggcagatgataatgctaaaggtaaaactaaagatgggttagatattaagccaggagtgattgatggtttagaaaatacaaagactattcattacggtaattctgataaaacgactgctaaagagaaatccgttaattttgactttgctaatgtaaaattccctggtgttggtgtttatcgttatacggtttctgaagtaaatggtaacaaggcaggcatagcttatgattctcaacaatggacagttgatgtttatgtggtaaatagagaagatggaggttttgaggctaagtatattgtttctacagaaggtggacaatctgataaaaaaccagttctgtttaaaaatttttttgatacaacttcgttaaaggttactaaaaaagtaacaggtaatactggggaacaccaacgttcgtttagtttcacattattattaacacctaatgaatgttttgaaaaaggtcaagttgtaaatattttacaaggaggagagactaaaaaagtagttattggtgaggaatatagttttaccttaaaagataaagaaagtgttactctatcacaattacctgttggaattgaatataaggtcactgaagaagatgttacaaaagatggttacaaaacaagtgccactttgaaagatggagatgttactgatggttataatttaggtgattctaaaacgacagacaaatctactgacgaaatcgttgtcacaaataagcgtgacactcaagttccaactggtgttgtagggacccttgctccatttgcagttcttagcattgtggctattggtggagttatctatattacaaaacgtaaaaaagcttaa

SEQ ID NO: 69 - DNA, 1650 bp, Streptococcus pyogenes
atgagagagaaaatattaatagcagcaaaaaaactaatgctagcttgtttagctatcttagctgtagtagggcttggaatgacaagagtatcagctttatcaaaagatgataaggcggagttgaagataacaaatatcgaaggtaaaccgaccgtgacactgtataaaattggtgatggaaaatacagtgagcgaggggattcttttattggatttgagttaaagcaaggtgtggagctaaataaggcaaaacctacatctcaagaaataaataaaatcgctaatggtattaataaaggtagtgttaaggctgaagtagttaatataaaagaacatgctagtacaacttatagttatacaacaactggtgcaggtatttacttggctatattgactggagctactgatggacgtgcctataatcctatcttactgacagcttcttacaatgaggaaaatccacttaagggagggcagattgacgcaactagtcattatctttttggagaagaagcagttgctaaatctagccaaccaacaattagcaagtcaattacaaaatccacaaaagatggtgataaagatacagcatctgtaggtgaaaaagttgattacaaattaactgttcagttaccaagttattcgaaagatgctatcaataaaacggtgtttatcactgacaaattgtctcagggacttactttccttccaaaaagtttaaagattatctggaatggtcaaacgttaacaaaggtgaatgaagaatttaaagctggagataaggtaattgctcaacttaaggttgaaaataatggatttaatctgaactttaattatgataaccttgataatcatgccccagaagttaactatagtgctctactaaatgaaaacgcagttgttggtaaaggtggtaatgacaataatgtagactattactattcaaataatccgaataaaggagagacccataaaacaactgagaagcctaaagagggtgaaggtactggtatcactaaaaagacggataaaaaaaccgtctacacctatcgtgtagcctttaagaaaacaggcaaagatcatgccccactagctggtgctgttttcggtatctattcagataaggaagcgaaacaattagtcgatattgttgtgacaaatgcacagggttatgcagcatcaagcgaagttgggaaagggacttattacattaaagaaattaaatcccctaagggttactctttaaatacaaatatttatgaagtggaaacttcatgggaaaaagctacaacgacttctacaactaatcgtttagagacaatttatacaacagatgataatcaaaagtctccaggaactaatacagttggttggttggaagatggtgtcttttacaaagaaaatccaggtggtgatgctaaacttgcctatatcaaacaatcaacagaggagacttctacaactatagaagtcaaagaaaatcaagctgaaggttcaggtacggtattattagaaactgaaattcctaacaccaaattaggtgaattaccttcgacaggtagcattggtacttacctctttaaagctattggttcggctgctatgatcggtgcaattggtatttatattgttaaacgtcgtaaagcttaa

SEQ ID NO: 70 - DNA, 1053 bp, Streptococcus pyogenes
ttggagagagagaaaatgaaaaaaaataaattattacttgctactgcaatcttagcaactgctttaggaacagcttctttaaatcaaaacgtaaaatctgagacggcaggagtgtccgaaaatgcaaaattaatagtaaaaaagacatttgactcttatacagacaatgaagttttaatgccaaaagctgattatacttttaaagtagaggcagatagttctgcaactgataaaacgaaagatggtttagagattaagccaggagtaactgaaggtttaactaccgagcagacaattgcttatgataactcagttaaaccatcggataaatctaagactgcaacttttgatttttcaaccgtaaaatttccagaagttggtgtttatcgttatacggtttcagaaatagatagcaaagttagtgggattaaatacgataccaaaacatggatagtggatgtttatgttgttaatgatggtaatggaggatttaaggcacggtatattgtatctaaagagaagggacaaaatgataaaaagcctgttgtttttgaaaactcctttaagacaacttctttaaaggtagaaaaacaggtgactggtaatacaggagaactaaagaaagacttcaatttcactttgacaattaatcctaatgataatttcgtagctggacaagttattaaattagagaaaggtggaattaaagctgatgttaagattggtgagccgtataaatttgctctaaagaatggtgagaaagtaactttatcaaaattaccagtaggtgttacttatagcatcattgaagatgaggcagataaagacggatacacaactaatgccaaaattacagatggtacggcagcgcctgtggaatataagttaggaaatcaacaattggctgacgaatctgctgacgaaatcgttgtcacaaataaccgtgacactcaagttccaactggtgttgtaggcacccttgctccatttgcagttcttagcattgtggctattggtggagttatctatattacaaaacgtaaaaaagcttaa

SEQ ID NO: 71 - DNA, 1035 bp, Streptococcus pyogenes
atgaaaaaaaacaaattattacttgctactgcaatcttagcaactgctttaggaatggcttcaatgagtcaaaatataaaagctgagacagcaggagtgattgatggttcaacattagtagttaaaaaaacattcccatcttatacggatgataacgttttaatgccaaaagctgattatagttttaaagtagaggcagatgataatgctaaaggtaaaactaaagatgggttagatattaagccaggagtgattgatggtttagaaaatacaaagactattcgttatagtaattctgataaaataactgctaaagagaagtccgttaattttgaatttgctaatgtaaaattcccaggtgttggtgtttatcgatatacggttgctgaagtaaatggtaacaaggcaggcataacttatgattctcaacaatggacagttgatgtttatgtggtcaataaagaaggtggaggttttgaggttaagtatattgtttctacagaagttggacaatctgagaaaaaaccagttctgtttaaaaattcttttgatacaacttccttaaaaattgaaaaacaagtaacagggaatactggggaacaccaacgtttgtttagtttcacattattattgacacctaatgaatgttttgaaaaaggtcaagttgtaaatattttacaaggaggagagactaaaaaagtagttattggtgaggaatatagttttaccttgaaagataaagaaagtgttactctatcacaattacctgttggaattgaatataagctcactgaagaagatgttacaaaagatggttacaaaacaagtgccactttgaaagatggggagcagtcatctacttatgaattaggtaaagaccataaaactgacaaatctgctgacgaaatcgttgtcacaaataagcgtgacactcaagttccaactggtgttgtaggcacccttgctccatttgcagttcttagcattgtggctattggtggagttatctatattacaaaacgtaaaaaagcttaa

SEQ ID NO: 72 - DNA, 1029 bp, Streptococcus pyogenes
atgaaaaaaaacaaattattacttgctactgcaatcttagcaactgctttaggaacagcttctttaaatcaaaacgtaaaagctgagacggcaggggttgtaacaggaaaaactttgccgattactaaaagtatgatttatactgataatgaaatattgatgccgaaaacaacttttacttttacaattgaaccagatactactgcaagtggtaaaactaaagatggattagaaattaaatcaggtgaaacaactggattaacaacgaaagcaatcgttagttatgacaatacagataaagagtctgctaaaaataaaacatcaaatttcaattttgaaacagtaacattttcaggtattggtatttatcgctatactgtttcagagcaaaatgatggcatagaaggtattcaatatgatggaaaaaaatggactgtagatgtttatgttgggaataaagaaggtggtggttttgaaccaaaatatgttgtatcaaaagaagttaattctgatgtgaaaaagccgatccgttttgaaaactcatttaaaacaacatcattaaaaattgaaaaacaagtaacaggtaacacaggggagcttcaaaaagattttaatttcacgctgatacttgaagcaagcgccttgtatgaaaaaggtcaagttgttaaaataattcaagatggtcaaacaaaagatgttgttattggacaagaatataaatttacattgcatgatcatcaaagcattatgttggctaagttaccaattggaatttcttacaagcttacggaagataaagctgacggatatactactacagcaactcttaaagagggtgaaattgatgcaaaagagtatgtattgggaaatctccagaaaactgacgaatctgctgacgaaatcgttgtcacaaataagcgtgacactcaagttccaactggtgttgtaggcacccttgctccatttgcagttcttagcattgtggctattggtggagttatctatattacaaaacgtaaaaaagcttaa

SEQ ID NO: 73 - DNA, 1023 bp, Streptococcus pyogenes; identical to SEQ ID NO: 58

SEQ ID NO: 74 - DNA, 1044 bp, Streptococcus pyogenes
ttggagagagagaaaatgaaaaaaaataaattattacttgctactgcaatcttagcaactgctttaggaacagcttctttaaatcaaaacgtaaaagctgagacggcaggggttgttagcagtggtcaattaacaataaaaaaatcaattacaaattttaatgatgatacacttttgatgcctaagacagactatacttttagcgttaatccggatagtgcggctacaggtactgaaagtaatttaccaattaaaccaggtattgctgttaacaatcaagatattaaggtttcttattctaatactgataagacatcaggtaaagaaaaacaagttgttgttgactttatgaaagttacttttcctagcgttggtatttaccgttatgttgttaccgagaataaagggacagcagaaggagttacatatgatgatacaaaatggttagttgacgtctatgttggtaataatgaaaagggaggtcttgaaccaaagtatattgtatctaaaaaaggagattctgctactaaagaaccaatccagtttaataattcattcgaaacaacgtcattaaaaattgaaaaggaagttactggtaatacaggagatcataaaaaagcatttaactttacattaacattgcaaccaaatgaatactatgaggcaagttcggttgtgaaaattgaagagaacggacaaacgaaagatgtgaaaattggggaggcatataagtttactttgaacgatagtcagagtgtgatattgtctaaattaccagttggtattaattataaagttgaagaagcagaagctaatcaaggtggatatactacaacagcaactttaaaagatggagaaaagttatctacttataacttaggtcaggaacataaaacagacaagactgctgatgaaatcgttgtcacaaataaccgtgacactcaagttccaactggtgttgtaggcacccttgctccatttgcagttcttagcattgtggctattggtggagttatctatattacaaaacgtaaaaaagcttaa

SEQ ID NO: 75 - DNA, 1044 bp, Streptococcus pyogenes; identical to SEQ ID NO: 74

SEQ ID NO: 76 - DNA, 925 bp, Streptococcus pyogenes
atgaaaaaaaataaattattacttgctactgcaatcttagcaactgctttaggaacagcttctttaaatcaaaacgtaaaagctgagacggcaggggttgttagcagtggtcaattaacaataaaaaaatcaattacaaattttaatgatgatacacttttgatgcctaagacagactatacttttagcgttaatccggatagtgcggctacaggtactgaaagtaatttaccaattaaaccaggtattgctgttaacaatcaagatattaaggtttcttattctaatactgataagacatcaggtaaagaaaaacaagttgttgttgactttatgaaagttacttttcctagcgttggtatttaccgttatgttgttaccgagaataaagggacagcagaaggagttacatatgatgatacaaaatggttagttgacgtctatgttggtaataatgaaaagggaggtcttgaaccaaagtatattgtatctaaaaaaggagattctgctactaaagaaccaatccagtttaataattcattcgaaacaacgtcattaaaaattgaaaaggaagttactggtaatacaggagatcataaaaaagcatttaactttacattaacattgcaaccaaatgaatactatgaggcaagttcggttgtgaaaattgaagagaacggacaaacgaaagatgtgaaaattggggaggcatataagtttactttgaacgatagtcagagtgtgatattgtctaaattaccagttggtattaattataaagttgaagaagcagaagctaatcaaggtggatatactacaacagcaactttaaaagatggagaaaagttatctacttataacttaggtcaggaacataaaacagacaagactgctgatgaaatcgttgtcacaaataaccgtgaca

SEQ ID NO: 77 - DNA, 803 bp, Streptococcus pyogenes
agcagtggtcaattaacaataaaaaaatcaattacaaattttaatgatgatacacttttgatgcctaagacagactatacttttagcgttaatccggatagtgcggctacaggtactgaaagtaatttaccaattaaaccaggtattgctgttaacaatcaagatattaaggtttcttattctaatactgataagacatcaggtaaagaaaaacaagttgttgttgactttatgaaagttacttttcctagcgttggtatttaccgttatgttgttaccgagaataaagggacagcagaaggagttacatatgatgatacaaaatggttagttgacgtctatgttggtaataatgaaaagggaggtcttgaaccaaagtatattgtatctaaaaaaggagattctgctactaaagaaccaatccagtttaataattcattcgaaacaacgtcattaaaaattgaaaaggaagttactggtaatacaggagatcataaaaaagcatttaactttacattaacattgcaaccaaatgaatactatgaggcaagttcggttgtgaaaattgaagagaacggacaaacgaaagatgtgaaaattggggaggcatataagtttactttgaacgatagtcagagtgtgatattgtctaaattaccagttggtattaattataaagttgaagaagcagaagctaatcaaggtggatatactacaacagcaactttaaaagatggagaaaagttatctacttataacttaggtcaggaacataaaacagacaagactgctgatgaaatcgt

SEQ ID NO: 78 - DNA, 803 bp, Streptococcus pyogenes; identical to SEQ ID NO: 77

SEQ ID NO: 79 - DNA, 1737 bp, Streptococcus pyogenes; identical to SEQ ID NO: 59

SEQ ID NO: 80 - DNA, 1737 bp, Streptococcus pyogenes; identical to SEQ ID NO: 59

SEQ ID NO: 81 - DNA, 1737 bp, Streptococcus pyogenes; identical to SEQ ID NO: 59

SEQ ID NO: 82 - DNA, 1737 bp, Streptococcus pyogenes; identical to SEQ ID NO: 59

SEQ ID NO: 83 - DNA, 1029 bp, Streptococcus pyogenes
atgaaaaaaaataaattattacttgctactgcaatcttagcaactgctttaggaacagcttctttaaatcaaaacgtaaaagctgagacggcaggggttgttagcagtggtcaattaacaataaaaaaatcaattacaaattttaatgatgatacacttttgatgcctaagacagactatacttttagcgttaatccggatagtgcggctacaggtactgaaagtaatttaccaattaaaccaggtattgctgttaacaatcaagatattaaggtttcttattctaatactgataagacatcaggtaaagaaaaacaagttgttgttgactttatgaaagttacttttcctagcgttggtatttaccgttatgttgttaccgagaataaagggacagcagaaggagttacatatgatgatacaaaatggttagttgacgtctatgttggtaataatgaaaagggaggtcttgaaccaaagtatattgtatctaaaaaaggagattctgctactaaagaaccaatccagtttaataattcattcgaaacaacgtcattaaaaattgaaaagaaagttactggtaatacaggagatcataaaaaagcatttaactttacattaacattgcaaccaaatgaatactatgaggcaagttcggttgtgaaaattgaagagaacggacaaacgaaagatgtgaaaattggggaggcatataagtttactttgaacgatagtcagagtgtgatattgtctaaattaccagttggtattaattataaagttgaagaagcagaagctaatcaaggtggatatactacaacagcaactttaaaagatggagaaaagttatctacttataacttaggtcaggaacataaaacagacaagactgctgatgaaatcgttgtcacaaataagcgtgacactcaagttccaactggtgttgtaggcacccttgctccatttgcagttcttagcattgtggctattggtggagttatctatattacaaaacgtaaaaaagcttaa

SEQ ID NO: 84 - DNA, 1029 bp, Streptococcus pyogenes; identical to SEQ ID NO: 83

SEQ ID NO: 85 - DNA, 1029 bp, Streptococcus pyogenes; identical to SEQ ID NO: 83

SEQ ID NO: 86 - DNA, 1038 bp, Streptococcus pyogenes
atgaaaaaaaataaattattacttgctactgcaatcttagcaactgctttaggaacagcttctttaaatcaaaacgtaaaatctgagacggcaggagtgtccgaaaatgcaaaattaatagtaaaaaagacatttgactcttatacagacaatgaagttttaatgccaaaagctgattatacttttaaagtagaggcagatagttctgcaactgataaaacgaaagatggtttagagattaagccaggagtaactgaaggtttaactaccgagcagacaattgcttatgataactcagttaaaccatcggataaatctaagactgcaacttttgatttttcaaccgtaaaatttccagaagttggtgtttatcgttatacggtttcagaaatagatagcaaagttagtgggattaaatacgataccaaaacatggatagtggatgtttatgttgttaatgatggtaatggaggatttaaggcacggtatattgtatctaaagagaagggacaaaatgataaaaagcctgttgtttttgaaaactcctttaagacaacttctttaaaggtagaaaaacaggtgactggtaatacaggagaactaaagaaagacttcaatttcactttgacaattaatcctaatgataatttcgtagctggacaagttattaaattagagaaaggtggaattaaagctgatgttaagattggtgagccgtataaatttgctctaaagaatggtgagaaagtaactttatcaaaattaccagtaggtgttacttatagcatcattgaagatgaggcagataaagacggatacacaactaatgccaaaattacagatggtacggcagcgcctgtggaatataagttaggaaatcaacaattggctgacgaatctgctgacgaaatcgttgtcacaaataaccgtgacactcaagttccaactggtgttgtaggcacccttgctccatttgcagttcttagcattgtggctattggtggagttatctatattacaaaacgtaaaaaagcttaa

SEQ ID NO: 87 - DNA, 1038 bp, Streptococcus pyogenes; identical to SEQ ID NO: 86

SEQ ID NO: 88 - DNA, 1038 bp, Streptococcus pyogenes; identical to SEQ ID NO: 86

SEQ ID NO: 89 - DNA, 1038 bp, Streptococcus pyogenes; identical to SEQ ID NO: 86

SEQ ID NO: 90 - DNA, 1038 bp, Streptococcus pyogenes
atgaaaaaaaataaattattacttgctactgcaatcttagcaactgctttaggaacagcttctttaaatcaaaacgtaaaatctgagacggcaggagtgtccgaaaatgcaaaattaatagtaaaaaagacatttgactcttatacagacaatgaagttttaatgccaaaagctgattatacttttaaagtagaggcagatagttctgcaactgataaaacgaaagatggtttagagattaagccaggagtaactgaaggtttaactaccgagcagacaattgcttatgataactcagttaaaccatcggataaatctaagactgcaacttttgatttttcaaccgtaaaatttccagaagttggtgtttatcgttatacggtttcagaaatagatagcaaagttagtgggattaaatacgataccaaaacatggatagtggatgtttatgttgttaatgatggtaatggaggatttaaggcacggtatattgtatctaaagagaagggacaaaatgataaaaagcctgttgtttttgaaaactcctttaagacaacttctttaaaggtagaaaaacaggtgactggtaatacaggagaaataaagaaagacttcaatttcactttgacaattaatcctaatgataattttgtagctggacaagttattaaattagagaaaggtggaattaaagctgatgttaagattggtgagccgtataaatttgctctaaagaatggtgagaaagtaactttatcaaaattaccagtaggtgttacttatagcatcattgaagatgaggcagataaagacggatacacaactaatgccaaaattacagatggtacggcagcgcctgtggaatataagttaggaaatcaacaattggctgacgaatctgctgacgaaatcgttgtcacaaataaccgtgacactcaagttccaactggtgttgtaggcacccttgctccatttgcagttcttagcattgtggctattggtggagttatctatattacaaaacgtaaaaaagcttaa

SEQ ID NO: 91 - DNA, 1038 bp, Streptococcus pyogenes; identical to SEQ ID NO: 86

SEQ ID NO: 92 - DNA, 1035 bp, Streptococcus pyogenes; identical to SEQ ID NO: 60

SEQ ID NO: 93 - DNA, 1035 bp, Streptococcus pyogenes
atgaaaaaaaacaaattattacttgttacggcaatcttagcaactgctttaggaacagcttctttaaatcaaaacgtaaaagctgagacggcaggagtgtccgaaaatgcaaaattaatagtaaaaaagacatttgactcttatacagacaatgaagttttaatgccaaaagctgattatacttttaaagtagaggcagatagtacagctagtggcaaaacgaaagacggtttagagattaagccaggtattgttaatggtttaacagaacagattatcagctatactaatactgataaaccagatagtaaagttaaaagtacagagtttgatttttcaaaagtagtattccctggtattggtgtttaccgctatactgtttcagaaaaacaaggtgatgttgaaggaattacctacgatactaagaagtggacagtagatgtttatgttggaaacaaagaaggtggtggttttgaacctaagtttattgtatctaaggaacaaggaacagacgtcaaaaaaccagttaattttaacaactcgtttgcaactacttcgttaaaagttaagaagaatgtatcggggaatactggagaattgcaaaaagaatttgactttacattgacgcttaatgaaagcacgaattttaaaaaagatcaaattgtttctttacaaaaaggaaacgagaaatttgaagttaagattggtactccctacaagtttaaactcaaaaatggggaatctattcaactagacaagttaccagttggtattacttataaagtcaatgaaatggaagctaataaagatgggtataaaacaacagcatccttgaaagagggagatggtcaatctaaaatgtatcaattggatatggaacaaaaaacagacgaatctgctgacgaaatcgttgtcacaaataagcgtgacactcaagttccaactggtgttgtaggcacccttgctccatttgcagttcttagcattgtggctattggtggagttatctatattacaaaacgtaaaaaagcttaa

SEQ ID NO: 94 - DNA, 1050 bp, Streptococcus pyogenes
ttggagagagaaaaaatgaaaaaaaacaaattattacttgctactgcaatcttagcaactgctttaggaacagcttctttaaatcaaaacgtaaaagctgagacggcaggagtgtccgaaaatgcaaaattaatagtaaaaaagacatttgactcttatacagacaatgaagttttaatgccaaaagctgattatacttttaaagtagaggcagatagtacagctagtggcaaaacgaaagacggtttagagattaagccaggtattgttaatggtttaacagaacagattatcagctatactaatactgataaaccagatagtaaagttaaaagtacagagtttgatttttcaaaagtagtattccctggtattggtgtttaccgctatactgtttcagaaaaacaaggtgatgttgaaggaattacctacgatactaagaagtggacagtagatgtttatgttggaaacaaagaaggtggtggttttgaacctaagtttattgtatctaaggaacaaggaacagacgtcaaaaaaccagttaattttaacaactcgtttgcaactacttcgttaaaagttaagaagaatgtatcggggaatactggagaattgcaaaaagaatttgactttacattgacgcttaatgaaagcacgaattttaaaaaagatcaaattgtttctttacaaaaaggaaacgagaaatttgaagttaagattggtactccctacaagtttaaactcaaaaatggggaatctattcaactagacaagttaccagttggtattacttataaagtcaatgaaatggaagctaataaagatgggtataaaacaacagcatccttgaaagagggagatggtcaatctaaaatgtatcaattggatatggaacaaaaaacagacgaatctgctgacgaaatcgttgtcacaaataagcgtgacactcaagttccaactggtgttgtaggcacccttgctccatttgcagttcttagcattgtggctattggtggagttatctatattacaaaacgtaaaaaagcttaa

SEQ ID NO: 95 - DNA, 2163 bp, Streptococcus pyogenes; identical to SEQ ID NO: 61

SEQ ID NO: 96 - DNA, 2163 bp, Streptococcus pyogenes; identical to SEQ ID NO: 61

SEQ ID NO: 97 - DNA, 2163 bp, Streptococcus pyogenes; identical to SEQ ID NO: 61

SEQ ID NO: 98 - DNA, 1059 bp, Streptococcus pyogenes; identical to SEQ ID NO: 62

SEQ ID NO: 99 - DNA, 1059 bp, Streptococcus pyogenes
ttggagagagagaaaatgaaaaaaaataaattattacttgctactgcaatcttagcaactgctttaggaacagcttctttaaatcaaaacgtaaaagctgagacggcaggagttgtaacaggaaaatcactacaagttacaaagacaatgacttatgatgatgaagaggtgttaatgcccgaaaccgcctttacttttactatagagcctgatatgactgcaagtggaaaagaaggcgacctagatattaaaaatggaattgtagaaggcttagacaaacaagtaacagtaaaatataagaatacagataaaacatctcaaaaaactaaaatagcacaatttgatttttctaaggttaaatttccagctataggtgtttaccgctatatggtttcagagaaaaacgataaaaaagacggaattaggtacgatgataaaaagtggactgtagatgtttatgttgggaataaggccaataacgaagaaggtttcgaagttctatatattgtatcaaaagaaggtacttctagtactaaaaaaccaattgaatttacaaactctattaaaactacttccttaaaaattgaaaaacaaataactggcaatgcaggagatcgtaaaaaatcattcaacttcacattaacattacaaccaagtgaatattataaaaccggatcagttgtgaaaatcgaacaggatggaagtaaaaaagatgtgacgataggaacgccttacaaatttactttgggacacggtaagagtgtcatgttatcgaaattaccaattggtatcaattactatcttagtgaagacgaagcgaataaagacggttacactacaacggcaacattaaaagaacaaggcaaagaaaagagttccgatttcactttgagtactcaaaaccagaaaacagacgaatctgctgacgaaatcgttgtcacaaataagcgtgacactcaagttccaactggtgttgtagggacccttgctccatttgcagttcttagcattgtagctattggtggagttatctatattacaagacgtaaaagagcttaa

SEQ ID NO: 100 - DNA, 1059 bp, Streptococcus pyogenes
ttggagagagagaaaatgaaaaaaaataaattattacttgctactgcaatcttagcaactgctttaggaacagcttctttaaatcaaaacgtaaaagctgagacggcaggagttgtaacaggaaaatcactacaagttacaaagacaatgacttatgatgatgaagaggtgttaatgcccgaaaccgcctttacttttactatagagcctgatatgactgcaagtggaaaagaaggcagcctagatattaaaaatggaattgtagaaggcttagacaaacaagtaacagtaaaatataagaatacagataaaacatctcaaaaaactaaaatagcacaatttgatttttctaaggttaaatttccagctataggtgtttaccgctatatggtttcagagaaaaacgataaaaaagacggaattaggtacgatgataaaaagtggactgtagatgtttatgttgggaataaggccaataacgaagaaggtttcgaagttctatatattgtatcaaaagaaggtacttctagtactaaaaaaccaattgaatttacaaactctattaaaactacttccttaaaaattgaaaaacaaataactggcaatgcaggagatcgtaaaaaatcattcaacttcacattaacattacaaccaagtgaatattataaaaccggatcagttgtgaaaatcgaacaggatggaagtaaaaaagatgtgacgataggaacgccttacaaatttactttgggacacggtaagagtgtcatgttatcgaaattaccaattggtatcaattactatcttagtgaagacgaagcgaataaagacggttacactacaacggcaacattaaaagaacaaggcaaagaaaagagttccgatttcactttgagtactcaaaaccagaaaacagacgaatctgctgacgaaatcgttgtcacaaataagcgtgacactcaagttccaactggtgttgtagggacccttgctccatttgcagttcttagcattgtagctattggtggagttatctatattacaaaacgtaaaaaagcttaa

SEQ ID NO: 101 - DNA, 1029 bp, Streptococcus pyogenes
  misc_feature (1)...(1029): n = A,T,C or G
atgaaaaaaaataaattattacttgctactgcaatcttagcaactgctttaggaacagcttctttaaatcaaaacgtaaaagctgagacggcaggggttgttagcagtggtcaattaacaataaaaaaatcaattacaaattttaatgatgatacacttttgatgcctaagacagactatacttttagcgttaatccggatagtgcggctacaggtactgaaagtaatttaccaattaaaccaggtattgctgttaacaatcaagatattaaggtttcttattctaatactgataagacatcaggtaaagaaaaacaagttgttgttgactttatgaaagttacttttcctagcgttggtatttaccgttatgttgttaccgagaataaagggacagcagaaggagttacatatgatgatacaaaatggttagttgacgtctatgttggtaataatgaaaagggaggtcttgaaccaaagtatattgtatctaaaaaaggagattctgctactaaagaaccaatccagtttaataattcattcgaaacaacgtcattaaaaattgaaaagaaagttactggtaatacaggagatcataaaaaagcatttaactttacattaacattgcaaccaaatgaatactatgaggcaagttcggttgtgaaaattgaagagaacggacaaacgaaagatgtgaaaattggggaggcatataagtttactttgaacgatagtcagagtgtgatattgtctaaattaccagttggtattaattataaagttgaagaagcagaagctaatcaaggtggatatactacaacagcaactttaaaagatggagaaaagttatctacttataacttaggtcaggaacataaaacagacaagactgctgatgaaatcgttgtcacaaataancgngacactcnagttccaacnggtgtngtaggcaccccncctccattcncagttcttancattgnggctantggtggngtnatntatnttacaaaacgnaaaaaagnataa

SEQ ID NO: 102 - DNA, 948 bp, Streptococcus pyogenes
atgaaaaaaaacaaattattacttgctactgcaatcttagcaactgctttaggaacagcttctttaaatcaaaacgtaaaagctgagacggcaggggttgtaacaggaaaaactttgccgattactaaaagtatgatttatactgataatgaaatattgatgccgaaaacaacttttacttttacaattgaaccagatactactgcaagtggtaaaactaaagatggattagaaattaaatcaggtgaaacaactggattaacaacgaaagcaatcgttagttatgacaatacagataaagagtctgctaaaaataaaacatcaaatttcaattttgaaacagtaacattttcaggtattggtatttatcgctatactgtttcagagcaaaatgatggcatagaaggtattcaatatgatggaaaaaaatggactgtagatgtttatgttgggaataaagaaggtggtggttttgaaccaaaatatgttgtatcaaaagaagttaattctgatgtgaaaaagccgatccgttttgaaaactcatttaaaacaacatcattaaaaattgaaaaacaagtaacaggtaacacaggggagcttcaaaaagattttaatttcacgctgatacttgaagcaagcgccttgtatgaaaaaggtcaagttgttaaaataattcaagatggtcaaacaaaagatgttgttattggacaagaatataaatttacattgcatgatcatcaaagcattatgttggctaagttaccaattggaatttcttacaagcttacggaagataaagctgacggatatactactacagcaactcttaaagagggtgaaattgatgcaaaagagtatgtattgggaaatctccagaaaacgacgaatctgctgacgaaatcgttgtcacaaataagcgtgacactcaagttccaactggtgttgtag

SEQ ID NO: 103 - DNA, 1671 bp, Streptococcus pyogenes; identical to SEQ ID NO: 63

SEQ ID NO: 104 - DNA, 1671 bp, Streptococcus pyogenes
  misc_feature (1)...(1671): n = A,T,C or G
ttgacaaacaggagagaaacagtgagagagaagatattaataacagcaaaaaaactaatgctagcttgtttagctatcttagcggtagtagggcttggaatgacaagagtatcagctttatcaaaagatgatactgcacaactaaagataacaaatattgaaggtgggccaacagtaacactttataaaataggagaaggtgtttacaacactaatggtgattcttttattaactttaaatatgctgagggggtttctttnactgaaacaggacctacatcacaagaaattactactattgcaaatggtattaatacgggtaaaataaagccttttagtactgaaaacgttagtatttctaatggaacagcaacttataatgcgagaggtgcatctgtttatattgcattattaacaggtgcgacagatggccgtacctacaatcctattttattagctgcatcttataatggtgagggaaatttagttactaaaaatattgattccaaatctaattatttatatggacaaacaagtgttgcnaaatcatcattaccatctattacaaagaaagtaaccgggacaatanatgacgtgaataaaaagactacctcgttaggaagtgtattgtcttattcgctgacatttgaattaccaagttataccaaagaagcagtcaataaaacagtatatgtttctgataatatgtcggaaggtcttacttttaactttaatagtcttacagtagaatggaaaggtaagatggctaatattactgaagatggttcagtaatggtagaaaatacaaaaatcggaatagctaaggaggttaataacggttttaatttaagttttatttatgatagtttagaatctatatcaccaaatataagttataaagctgttgtaaacaataaagctattgttggtgaagagggtaatcctaataaagctgaattcttctattcaaataatccaacaaaaggtaatacatacgataatttagataagaagcctgataaagggaatggtattacatccaaagaagattctaaaattgtttatacttatcaaatagcgtttagaaaagttgatagtgttagtaagaccccacttattggtgcaatttttggagtttatgatactagtaataaattaattgatattgttacaaccaataaaaatggatatgctatttcaacacaagtatcttcaggaaaatataaaattaaggaattaaaagctcctaaaggttattcattgaatacagaaacttatgaaattacggcaaattgggtaactgctacagtcaagacaagtgctaattcaaaaagtactacttatacatctgataaaaataaggcgacagataattcagagcaagtaggatggttaaaaaatggtatattctattctatagatagtagacctacaggaaatgatgttaaagaggcttatattgaatctactaaggctttaactgatggaacaactttctcaaaatcgaatgaaggttcaggtacagtattattagaaactgacatccctaacaccaagctaggtgaattaccttcgacaggtagcattggtacttacctctttaaagctattggttcggctgctatgattggtgcaattggtatttatattgttaaacgtcgtaaagcttaa

SEQ ID NO: 105 - DNA, 1614 bp, Streptococcus pyogenes
atgctagcttgtttagctatcttagcggtagtagggcttggaatgacaagagtatcagctttatcaaaagatgatactgcacaactaaagataacaaatattgaaggtgggccaacagtaacactttataaaataggagaaggtgtttacaacactaatggtgattcttttattaactttaaatatgctgagggggtttctttaactgaaacaggacctacatcacaagaaattactactattgcaaatggtattaatacgggtaaaataaagccttttagtactgaaaacgttagtatttctaatggaacagcaacttataatgcgagaggtgcatctgtttatattgcattattaacaggtgcgacagatggccgtacctacaatcctattttattagctgcatcttataatggtgagggaaatttagttactaaaaatattgattccaaatctaattatttatatggacaaacaagtgttgcaaaatcatcattaccatctattacaaagaaagtaaccgggacaatagatgacgtgaataaaaagactacctcgttaggaagtgtattgtcttattcgctgacatttgaattaccaagttataccaaagaagcagtcaataaaacagtatatgtttctgataatatgtcggaaggtcttacttttaactttaatagtcttacagtagaatggaaaggtaagatggctaatattactgaagatggttcagtaatggtagaaaatacaaaaatcggaatagctaaggaggttaataacggttttaatttaagttttatttatgatagtttagaatctatatcaccaaatataagttataaagctgttgtaaacaataaagctattgttggtgaagagggtaatcctaataaagctgaattcttctattcaaataatccaacaaaaggtaatacatacgataatttagataggaagcctgataaagggaatggtattacatccaaagaagattctaaaattgtttatacttatcaaatagcgtttagaaaagttgatagtgttagtaagaccccacttattggtgcaatttttggagtttatgatactagtaataaattaattgatattgttacaaccaataaaaatggatatgctatttcaacacaagtatcttcaggaaaatataaaattaaggaattaaaagctcctaaaggttattcattgaatacagaaacttatgaaattacggcaaattgggtaactgctacagtcaagacaagtgctaattcaaaaagtactacttatacatctgataaaaataaggcgacagataattcagagcaagtaggatggttaaaaaatggtatattctattctatagatagtagacctacaggaaatgatgttaaagaggcttatattgaatctactaaggctttaactgatggaacaactttctcaaaatcgaatgaaggttcaggtacagtattattagaaactgacatccctaacaccaagctaggtgaattaccttcgacaggtagcattggtacttacctctttaaagctattggttcggctgctatgattggtgcaattggtatttatattgttaaacgtcgtaaagcttaa

SEQ ID NO: 106 - DNA, 643 bp, Streptococcus pyogenes
  misc_feature (1)...(643): n = A,T,C or G
gtaacagtaaaatataagaatacagataaaacatctcaaaaaactaaaatagcacaatttgatttttctaaggttaaatttccagctataggtgtttaccgctatatggtttcagagaaaaacgataaaaaagacggaattacgtacgatgataaaaagtggacngtagatgtttatgttgggaataaggccaataacgaagaaggtttcgaagttctatatattgtatcaaaagaaggtacttctagtnctaaaaaaccaattgaatttacaaactctattaaaactacttccttaaaaattgaaaaacaaataactggcaatgcaggagatcgtaaaaaatcattcaacttcacattnacattacanccaagtgaatattataaaactggatcagttgtgaaaatcgaacaggatggaagtaaaaaagatgtgacgataggaacgccttacaaatttactttgggacacggtaagagtgtcatgttatcgaaattnccaattggtatcaattactatcttagtgaagacgaagcgaataaagacggntacactacancggcaacattaaaagaacaaggcaaagaaaagagttccgatttcactttgagtactcaaaaccagaaaacagacgaatctgctg

SEQ ID NO: 107 - DNA, 1056 bp, Streptococcus pyogenes; identical to SEQ ID NO: 66

SEQ ID NO: 108 - DNA, 1056 bp, Streptococcus pyogenes
atgaaaaaaaacaaattattacttgcaagtacaattttggctactgctttgggaatgaataatttagcatcagctgaagtaaattatgtaaaatcaggagttattgatggtgcaaagttagaaatccataaaacaattaagaattatgatgatgataaagttttaatgccaaatgtgattttcaagtttaatattaagccagatgattcagttgttgctggtaaaaaagaagaaaaatcgggattagatataaaaccaggtatagttgatgggttggaaactagtaaggaagtatcttatacaaatagcgacaaaccaaatagtaaagataaatatacttactttgatttttctcaagtgaaatttactaatgttggtatctatcgctatgttgttgaagaagtacaggatacagtatccggtattcattatgatagtcaaaaatggtatatagacgtttatgttgttgaaggagataatggattcgttccgaaatatattgtatcaagtaaaacattggaaactaaagaaccagttttatttagtaattcatttgatacaacttctttagttgttaaaaaagaggttacaggaaatactggagataaaacgaaaaactttaaattccaattattattaaaagagaatgcttatttctcagcaggtcaaaaagtttcagttacaataacttctgagaaagcttcagaagtcacgactgctaccataggtcaaccacttatctttgagttaaaacacaatgaacaacttaaattggataaattgcctgttggtattacgtatcaaattgatgaaactagtaaaaatagtgacagctacacaacgactgctacaattcaagaaggtgaacaatcacaaaattcttatgttttaaactcagataaggaaactgataaaagtccagatattattacagtcacaaataagcgtgacactcaagttccaactggtgttgtagggacccttgctccatttgcagttcttagcattgtggctactggtggagtgatctatattacaaaacgtaaaaaagcttaa

SEQ ID NO: 109 - DNA, 1056 bp, Streptococcus pyogenes; identical to SEQ ID NO: 108

SEQ ID NO: 110 - DNA, 1056 bp, Streptococcus pyogenes; identical to SEQ ID NO: 108

SEQ ID NO: 111 - DNA, 1056 bp, Streptococcus pyogenes; identical to SEQ ID NO: 108

SEQ ID NO: 112 - DNA, 1056 bp, Streptococcus pyogenes; identical to SEQ ID NO: 108

SEQ ID NO: 113 - DNA, 1041 bp, Streptococcus pyogenes
atgaaaaaaaataaattattacttgctattgcaatcttagcaactgctttaggaacagcttctttaaatcaaaacataaaagctgagacggcaggggtgactaatggaacacagttgactatcaaaaaaacaattgctaattataatgactcagaagtactaatgcctaaggctacatttacttttgaggttaaacctgataatagtgttacaggagttgaaaaaacagttgatggtttgacgattaaagcaggtatagctgaaggtttagtaaaaacaggcaatgttgaatatagtaatactgataaagtagaaaacaaagataaaacgactacttttgatttttcaaccgtaaaatttccagaagttggtgtttatcgttatacggtttcagaaacagatagcaaagttagtgggattaaatacgataccaaaacatggatagtggatgtctatgttgttaatgatggtaatggaggatttaaggcacagtatattgtatctaaagagaagggacaaaatgataaaaagcctgttgtttttgaaaactcctttaagacaacttctttaaaggtagaaaaacaggtgactggtaatacaggagaactaaagaaagactttaatttcactttgacaattaatcctaatgataatttcgtagctggacaagttattaaattagagaaaggtggaattaaagctgatgttaagattggtgagccgtataaatttgctctaaagaatggtgagaaagtaactttatcaaaattaccagtaggcattacttatagtataattgaagatgatgcaggtaaagatggttacaaaacaacagcaattttgaaagatggggagcagtcatctacttatgaattaggtaaaaaccagaaaacagacgaatctgctgacgaaatcgttgtcacaaataagcgtgacactcaagttccaactggtgttgtaggcacccttgctccatttgcagttcttagcattgtggctattggtggagttatctatattacaaaacgtaaaaaagcttaa

SEQ ID NO: 114 - DNA, 1023 bp, Streptococcus pyogenes; identical to SEQ ID NO: 58

SEQ ID NO: 115 - DNA, 29 bp, Streptococcus pyogenes
gtgcgtcatatggctacaacagttcacgg

SEQ ID NO: 116 - DNA, 38 bp, Streptococcus pyogenes
gcgtctcgagaaagtcttttttatttgtaaaagtaatg

SEQ ID NO: 117 - DNA, 30 bp, Streptococcus pyogenes
gtgcgtcatatggctaagactgtttttggt

SEQ ID NO: 118 - DNA, 26 bp, Streptococcus pyogenes
gcgtctcgaggccattgatcttttga

SEQ ID NO: 119 - DNA, 30 bp, Streptococcus pyogenes
gtgcgtcatatggaggacaccagagtgcct

SEQ ID NO: 120 - DNA, 37 bp, Streptococcus pyogenes
gcgtctcgagtgaaggacgtttgttgtttttaaccga

SEQ ID NO: 121 - DNA, 37 bp, Streptococcus pyogenes
gtgcgtgctagcgaaactcaagataacaatccagcac

SEQ ID NO: 122 - DNA, 30 bp, Streptococcus pyogenes
gcgtctcgagaacactcggtggacgttttg

SEQ ID NO: 123 - DNA, 27 bp, Streptococcus pyogenes
gtgcgtcatatggagacggcaggagtg

SEQ ID NO: 124 - DNA, 35 bp, Streptococcus pyogenes
gcgtctcgagagcttttttacgttttgtaatatag

SEQ ID NO: 125 - DNA, 30 bp, Streptococcus pyogenes
gtgcgtgctagcgctgaagaacaatcagtg

SEQ ID NO: 126 - DNA, 28 bp, Streptococcus pyogenes
gcgtctcgagaagatcttttcggttttc

SEQ ID NO: 127 - DNA, 38 bp, Streptococcus pyogenes
gtgcgtcatatggaagcagaatcatcacataaaaccga

SEQ ID NO: 128 - DNA, 37 bp, Streptococcus pyogenes
gcgtctcgagggtgatttttttgttaatcacccgttg

SEQ ID NO: 129 - DNA, 33 bp, Streptococcus pyogenes
gtgcgtcatatgttatcaggacattcgaggtca

SEQ ID NO: 130 - DNA, 43 bp, Streptococcus pyogenes
gcgtctcgagaacaaactttttattaataatctcattaaattg

SEQ ID NO: 131 - DNA, 26 bp, Streptococcus pyogenes
gtgcgtcatatggagacggcaggggt

SEQ ID NO: 132 - DNA, 28 bp, Streptococcus pyogenes
gcgtctcgagagtgtcacgcttatttgt

SEQ ID NO: 133 - DNA, 32 bp, Streptococcus pyogenes
gtgcgtcatatgaaagatgatactgcacaact

SEQ ID NO: 134 - DNA, 30 bp, Streptococcus pyogenes
gcgtctcgagttcacctagcttggtgttag

SEQ ID NO: 135 - DNA, 37 bp, Streptococcus pyogenes
gtgcgtcatatgtacagtagattgaagagagagttag

SEQ ID NO: 136 - DNA, 38 bp, Streptococcus pyogenes
gcgtctcgagctgataaatcttataatttttaatcatg

SEQ ID NO: 137 - DNA, 40 bp, Streptococcus pyogenes
gtgcgtcatatggagtactggttcaatattgaatgttaag

SEQ ID NO: 138 - DNA, 33 bp, Streptococcus pyogenes
gcgtctcgagagtgtcacgcttatttgtgactg

SEQ ID NO: 139 - DNA, 38 bp, Streptococcus pyogenes
gtgcgtgctagccaaagcatatttggagaggaaaagag

SEQ ID NO: 140 - DNA, 43 bp, Streptococcus pyogenes
actcgctagcggccgcaagatcttttcggttttcaaaagctac

SEQ ID NO: 141 - DNA, 26 bp, Streptococcus pyogenes
gtgcgtgctagcgagacggcaggggt

SEQ ID NO: 142 - DNA, 27 bp, Streptococcus pyogenes
gcgtctcgagagtgtcacggttatttg

SEQ ID NO: 143 - DNA, 30 bp, Streptococcus pyogenes
gtgcgtgctagccaaagcatatttggagag

SEQ ID NO: 144 - DNA, 29 bp, Streptococcus pyogenes
gcgtctcgagaagatctttacggttttca

SEQ ID NO: 145 - DNA, 36 bp, Streptococcus pyogenes
gtgcgtcatatgttatcaaaagatgataaggcggag

SEQ ID NO: 146 - DNA, 37 bp, Streptococcus pyogenes
gcgtctcgagttcacctaatttggtgttaggaatttc

SEQ ID NO: 147 - DNA, 45 bp, Streptococcus pyogenes
gtgcgtcatatgacagcttctttaaatcaaaacgtaaaatctgag

SEQ ID NO: 148 - DNA, 34 bp, Streptococcus pyogenes
gcgtctcgagttgagtgtcacggttatttgtgac

SEQ ID NO: 149 - DNA, 32 bp, Streptococcus pyogenes
gtgcgtcatatggctcacgaattggttgaggt

SEQ ID NO: 150 - DNA, 37 bp, Streptococcus pyogenes
gcgtctcgagaagatctttacggttttcaaaagtgac

SEQ ID NO: 151 - DNA, 34 bp, Streptococcus pyogenes
gtgcgtgctagcgctcacgaattggttgaggtac

SEQ ID NO: 152 - DNA, 37 bp, Streptococcus pyogenes
gcgtctcgagaagatcttttcggttttcaaaagtgac

SEQ ID NO: 153 - DNA, 32 bp, Streptococcus pyogenes
gtgcgtcatatggagactttgcaggacagaac

SEQ ID NO: 154 - DNA, 34 bp, Streptococcus pyogenes
gcgtctcgagttcaggacgtttgttgttttctac

SEQ ID NO: 155 - DNA, 26 bp, Streptococcus pyogenes
gtgcgtcatatggagacggcaggggt

SEQ ID NO: 156 - DNA, 28 bp, Streptococcus pyogenes
gcgtctcgagagtgtcacgcttatttgt

SEQ ID NO: 157 - DNA, 31 bp, Streptococcus pyogenes
gtgcgtcatatggctgaagaaaaatctactg

SEQ ID NO: 158 - DNA, 28 bp, Streptococcus pyogenes
gcgtctcgagaagatcttttcggttttc

SEQ ID NO: 159 - DNA, 43 bp, Streptococcus pyogenes
gtgcgtcatatggaagtaaattatgtaaaatcaggagttattg

SEQ ID NO: 160 - DNA, 33 bp, Streptococcus pyogenes; identical to SEQ ID NO: 138

SEQ ID NO: 161 - DNA, 24 bp, Streptococcus pyogenes
tctcaactctattaagagtgagag

SEQ ID NO: 162 - DNA, 26 bp, Streptococcus pyogenes
tttacataatttacttcagctgatgc

SEQ ID NO: 163 - DNA, 24 bp, Streptococcus pyogenes
aacagcaatacctggtttaattgg

SEQ ID NO: 164 - DNA, 23 bp, Streptococcus pyogenes
accaacttctggaaattttacgg

SEQ ID NO: 165 - DNA, 23 bp, Streptococcus pyogenes
gaaaccttcttcgttattggcct

SEQ ID NO: 166 - DNA, 27 bp, Streptococcus pyogenes
attaagcgtcaatgtaaagtcaaattc

SEQ ID NO: 167 - DNA, 26 bp, Streptococcus pyogenes
cctcaccaataactacttttttagtc

SEQ ID NO: 168 - DNA, 26 bp, Streptococcus pyogenes
gtagtataaccattagtattggcatc

SEQ ID NO: 169 - DNA, 22 bp, Streptococcus pyogenes
caaagatagccgtaccaatacc

SEQ ID NO: 170 - DNA, 19 bp, Streptococcus pyogenes
ttagctacggtagcgggac

SEQ ID NO: 171 - DNA, 25 bp, Streptococcus pyogenes
actgccaattaataatttgggagag

SEQ ID NO: 172 - DNA, 23 bp, Streptococcus pyogenes
gcttggaatgacaagagtatcag

SEQ ID NO: 173 - DNA, 31 bp, Streptococcus pyogenes
ttaattttatattttcctgaagatacttgtg

SEQ ID NO: 174 - DNA, 25 bp, Streptococcus pyogenes
tctaaacgattagttgtagaagtcg

SEQ ID NO: 175 - DNA, 28 bp, Streptococcus pyogenes
ttgaaaacgaagatatttagtagattgg

SEQ ID NO: 176 - DNA, 29 bp, Streptococcus pyogenes
ctattccgatttatcatttttattacgac

SEQ ID NO: 177 - DNA, 27 bp, Streptococcus pyogenes
atgaaattacgtcacttactattaacg

SEQ ID NO: 178 - DNA, 32 bp, Streptococcus pyogenes
ttaagcatttttctttttaacaaagtaaagag

SEQ ID NO: 179 - protein, 757 aa, Streptococcus pyogenes
MKKTRFPNKLNTLNTQRVLSKNSKRFTVTLVGVFLMIFALVTSMVGAKTVFGLVESSTPNAINPDSSSEYRWYGYESYVRGHPYYKQFRVAHDLRVNLEGSRSYQVYCFNLKKAFPLGSDSSVKKWYKKHDGISTKFEDYAISPRITGDELNQKLRAVMYNGHPQNANGIMEGLEPLNAIRVTQEAVWYYSDNAPISNPDESFKRESESNLVSTSQLSLMRQALKQLIDPNLATKMPKQVPDDFQLSIFESEDKGDKYNKGYQNLLSGGLVPTKPPTPGDPPMPPNQPQTTSVLIRKYAIGDYSKLLEGATLQLTGDNVNSFQARVFSSNDIGERIELSDGTYTLTELNSPAGYSIAEPITFKVEAGKVYTIIDGKQIENPNKEIVEPYSVEAYNDFEEFSVLTTQNYAKFYYAKNKNGSSQVVYCFNADLKSPPDSEDGGKTMTPDFTTGEVKYTHIAGRDLFKYTVKPRDTDPDTFLKHIKKVIEKGYREKGQAIEYSGLTETQLRAATQLAIYYFTDSAELDKDKLKDYHGFGDMNDSTLAVAKILVEYAQDSNPPQLTDLDFFIPNNNKYQSLIGTQWHPEDLVDIIRMEDKKEVIPVTHNLTLRKTVTGLAGDRTKDFHFEIELKNNKQELLSQTVKTDKTNLEFKDGKATINLKHGESLTLQGLPEGYSYLVKETDSEGYKVKVNSQEVANATVSKTGITSDETLAFENNKEPVVPTGVDQKINGYLALIVIAGISLGIWGIHTIRIRKHD

SEQ ID NO: 180 - protein, 890 aa, Streptococcus pyogenes
MKKKQKLWRGLSVTLLILSQIPFGILVQGETQDNNPALGKVIVKKTGENAMPLGKATFVLKNDHDKSEISHETVEGSGEAAFENIKPGNYTLTEKTAPIGYKKTDKTWKVKVADNGATTIEDIDPDKVEKRKEALNGQYPESAIYEDTKESYPLVKVEDSKVGNQYKALNPINGEDGRREITEGWLSKKIKKVNELDKNKYKIELTVEGKTIVETKELNQPLDVVLLLDNSNSMNNERAHNSQRALKAGEAVEKLIDKITSNKDNRVALVTYASTIFDGTEATVSKGVADRNGKALNDSVSWDYHKTTFTATTHNYSYLNLTNDANEVNILKSRIPKEAEHINGNRTLYQFGATFTQKALMKANEILETQSSNDRKKVIFHVTDGVPTMSYAINFNPYISTSYQNQFKSFLNKTPDRSGILQEDFIINGDDYQIVKGDGESFKLFSDRKVPVPGGTTQAAYQVPQNQLSVMSNEGYAINRGYIYLYWRDYNWVYPFDPKTKTVSATKQIKTHGEPTTLYFNGNIKPKGYDIFTVGIGVNGDPGATPLEAKEFMQSISSKTENYTNVDDTNKIYDELNKYFKTIVEEKHSIVDGNVTDPMGEMIEFQLKDGQSFTHDDYVLVGNDGSQLKNGVALGGPNSDGGILKDVTVTYDKTSQTIKINHLNLGSGQKVVLTYDVRLKENYISNKFYNTNNRTTLSPKSEKEPNTIRDFPIPKIRDVREFPVLTISNQKKMGEVEFIKVNKDKHSESLLGAKFQLQIEKDFSGYKQFVPEGSDVTTKNDGKIYFKALQDGNYKLYEISSPDGYIEVKTKPVVTFTIQNGEVTNLKQDPNANKNQIGYFEEDGKHLITNTPKRPPSVFPKTGGIGTIVYILVGCTLMIVATGSFRRNQQ

SEQ ID NO: 181 - protein, 890 aa, Streptococcus pyogenes; identical to SEQ ID NO: 180

SEQ ID NO: 182 - protein, 890 aa, Streptococcus pyogenes; identical to SEQ ID NO: 180

SEQ ID NO: 183 - protein, 890 aa, Streptococcus pyogenes; identical to SEQ ID NO: 180

SEQ ID NO: 184 - protein, 744 aa, Streptococcus pyogenes
MQKRDKTNYGSANNKRRQTTIGLLKVFLTFVALIGIVGFSIRAFGAEEQSVPNKQSSVQDYPWYGYDSYSKGYPDYSPLKTYHNLKVNLDGSKEYQAYCFNLTKHFPSKSDSVRSQWYKKLEGTNENFIKLADKPRIEDGQLQQNILRILYNGYPNDRNGIMKGIDPLNAILVTQNAIWYYTDSSYISDTSKAFQQEETDLKLDSQQLQLMRNALKRLINPKEVESLPNQVPANYQLSIFQSSDKTFQNLLSAEYVPDTPPKPGEEPPAKTEKTSVIIRKYAEGDYSKLLEGATLKLAQIEGSGFQEKIFDSNKSGEKVELPNGTYVLSELKPPQGYGVATPITFKVAAEKVLIKNKEGQFVENQNKEIAEPYSVTAFNDFEEIGYLSDFNNYGKFYYAKNTNGTNQVVYCFNADLHSPPDSYDHGANIDPDVSESKEIKYTHVSGYDLYKYAATPRDKDADFFLKHIKKILDKGYKKKGDTYKTLTEAQFKAPTQLSIYYYTDSADLTTLKTYNDNKGYHGFDKLDDATLAVVHELITYAEDVTLPMTQNLYFFVPNSSRYQALIGTQYHPNELIDVISMENKQAPIIPITHKLTISKTVTGTIANKKKEFNFEIHLKSSDGQAISGTYPTNSGELTVTDGKATFTLKDGESLIVEGLPSGYSYEITETGASDYEVSVNGKNAPDGKATKASVKEDETVAFENRKDLVPPTGLTTDGAIYLWLLLLVPFGLLVWLFGRKGTKK

SEQ ID NO: 185 - protein, 744 aa, Streptococcus pyogenes
MQKRDKTNYGSANNKRRQTTIGLLKVFLTFVALIGIVGFSIRAFGAEEQSVPNKQSSVQDYPWYGYDSYSKGYPDYSPLKTYHNLKVNLDGSKEYQAYCFNLTKHFPSKSDSVRSQWYKKLEGTNENFIKLADKPRIEDGQLQQNILRILYNGYPNDRNGIMKGIDPLNAILVTQNAIWYYTDSSYISDTSKAFQQEETDLKLDSQQLQLMRNALKRLINPKEVESLPNQVPANYQLSIFQSSDKTFQNLLSAEYVPDTPPKPGEEPPAKTEKTSVIIRKYAEGDYSKLLEGATLKLAQIEGSGFQEKIFDSNKSGEKVELPNGTYVLSELKPPQGYGVATPITFKVAAEKVLIKNKEGQFVENQNKEIAEPYSVTAFNDFEEIGYLSDFNNYGKFYYAKNTNGTNQVVYCFNADLHSPPDSYDHGANIDPDVSESKEIKYTHVSGYDLYKYAATPRDKDADFFLKHIKKILDKGYKKKGDTYKTLTEAQFRAATQLAIYYYTDSADLTTLKTYNDNKGYHGFDKLDDATLAVVHELITYAEDVTLPMTQNLDFFVPNSSRYQALIGTQYHPNELIDVISMEDKQAPIIPITHKLTISKTVTGTIADKKKEFNFEIHLKSSDGQAISGTYPTNSGELTVTDGKATFTLKDGESLIVEGLPSGYSYEITETGASDYEVSVNGKNAPDGKATKASVKEDETVAFENRKDLVPPTGLTTDGAIYLWLLLLVPFGLLVWLFGRKGTKK

SEQ ID NO: 186 - protein, 1367 aa, Streptococcus pyogenes
MYSRLKRELVIVINRKKKYKLIRLMVTLGLIFSQLAPPFGTLMALSGHSRSKSPVTEVKADNVSTLKTGSFKLKKFDEDGKTPIKDVTFQLTSETNPSNYKIEQITSGAGDASFANIPPGTYLLKEVAPPSGYQVMADYYRITVSPDGYTQYTYVKVGTTTSSPTTSLPSTSGGGTGGTVFRTSKTSGVVTVTDYNFTTKNKAQGNTDYTTLWATSGEFFDMSFKLKVNEGTQAGDSFTIKLSDYLSPNGIREKFISAPPLMLDKKVVATGIYDESTNSYIYTFNDLINHKQNAEITVNYTFSPEAKKVDRDWYVNTYNITNIIDGQKQDSGNFTIDYGQGQYMTGTLNSGLRLRNNITYLNRTTGEVEYTIYLNNGASPRDKDFTVKNPVTGRHFLNLEDKSASVAFTQKNITVYRVPLSQKTSKMPYSMSGETDGLESIPFDYSSKGITFTKESFHDNETNSNTAGLLIKIKAYITADNKRSADVSLSAGWTYTNLIRSRSDAKASAFELGNTSSGVANNIEPTVTIRNYKIKKGSIVFTKQDVETKMTLSGVAFRLEKKEENDWQIVEKYKDVQTGTEGKLILSDLDPGEYQLIETKPLDGYLVSSGPVVTFTITDQGTEGTVKPSDKIIPNTKPGKQKIKVIKKDEQSRVPLAGAKFQLESNKGVVLTGETDGKGEYTFTNLPFGDYILTEIAAPKGYILDKTPRSIAIGDTVDKEPEPTVVEAATPRTVRSVSPSATVSDKDVSRNILVKKVEFTTTNGQTPLQVKPNQGENLIARSEFELKKEIDIKKGDYFAVKLSDNIDPFGVSTGETTTFNITGPYGTLAVGKYDSKSRSIIYTFTDYVEKYEVSNFSTILPYFIDRYAVTRDADINISTSVGSQTNTARVRVLYTPYYGATDSYSPVNIGSMITKLDEKNGTFTNYIYINPMQQFIRNGKLTFQGGGSAIIDNETQVTLFKVNNSTDMPPSWGITDSTLRVENDILVNKKQGEISVDFENILEARNSFIMKVVGKIASSGTSVRTSATLSQKYDNTYGYYSTNGRWIPKGPYSEYYRYDTTAILHSGDSNVDGAIRISVTNRKNSVAFTKTNGLEKPLEATFELRRLNSNKTFTSVKTTKSTKDTGKFSFEGMESGSYEVWETQSPEGYLKPDKAVATFKVDKDGTIKDLTPDNGKIINYPNTAKIIFTKMLASEKEELSPATKEKSATFSLWRLKEESLKETNTVSQAYDEQYYEPVMENNSVRTVTSDSSGNVLFDKLSPGFYAIKEEKAPDGYVKQQGIVRIFQVDSSGKVIKYQYFKDKSIAGKLTEITDLETEQLKQFNEIINKKFVFPMTGGQGIALLMIIGGTMMGIAYFGHRRKQRLND

SEQ ID NO: 187 - protein, 1367 aa, Streptococcus pyogenes; identical to SEQ ID NO: 186

SEQ ID NO: 188 - protein, 1367 aa, Streptococcus pyogenes; identical to SEQ ID NO: 186

SEQ ID NO: 189 - protein, 756 aa, Streptococcus pyogenes
MNNKKLQKKQDAPRVSNRKPKQLTVTLVGVFLMFLTLVSSMRGAQSIFGEEKRIEEVSVPKIKSPDDAYPWYGYDSYDSSHPYYERFKVAHDLRVNLNGSKSYQVYCFNINSHYPNRKNAFSKQWFKRVDGTGDVFTNYAQTPKIRGESLNNKLLSIMYNAYPKNANGYMDKIEPLNAILVTQQAVWYYSDSSYGNIKTLWASELKDGKIDFEQVKLMREAYSKLISDDLEETSKNKLPQGSKLNIFVPQDKSVQNLLSAEYVPESPPAPGQSPEPPVQTKKTSVIIRKYAEGDYSKLLEGATLRLTGEDILDFQEKVFQSNGTGEKIELSNGTYTLTETSSPDGYKIAEPIKFRVVNKKVFIVQKDGSQVENPNKEVAEPYSVEAYSDMQDSNYINPETFTPYGKFYYAKNKDKSSQVVYCFNADLHSPPESEDGGGTIDPDISTMKEVKYTHTAGSDLFKYALRPRDTNPEDFLKHIKKVIEKGYNKKGDSYNGLTETQFRAATQLAIYYFTDSTDLKTLKTYNNGKGYHGFESMDEKTLAVTKELINYAQDNSAPQLTNLDFFVPNNSKYQSLIGTEYHPDDLVDVIRMEDKKQEVIPVTHSLTVKKTVVGELGDKTKGFQFELELKDKTGQPIVNTLKTNNQDLVAKDGKYSFNLKHGDTIRIEGLPTGYSYTLKETEAKDYIVTVDNKVSQEAQSASENVTADKEVTFENRKDLVPPTGFTTDGGTYLWLLLLVPFGLLVWFFGRKGLKND

SEQ ID NO: 190 - protein, 1036 aa, Streptococcus pyogenes
MYSRLKRELVIVINRKKKYKLIRLMVTVGLIFSQLVLPIRRLGLQMISTQTKVIPQEIVTQTETQGTQVVATKQKLESENSSLKVALKRESGFEHNATIDASLDTESQGDNSQRSVTQAIVTMALELRKQGLSIVDTKIVRIQSSTNQRNDITTTLTFKNGLSLEGASTEANDPNVRVGIVNPNDTVQTITPTIKQDADGKVKNLVFTGRLGKQVIIVSTTRLKEEQTISLDSYGELVIDGAVGLSQKDRPPYSKPITVNILKPKLSSIESSLDSKDFEIVKTIDNLYTWDDQFYLLDFISKQYEVLKTDYQSAKDSTPQTRDILFGEYTVEPLVMNKGHNNTINIYIRSTRPLGLKPIGAAPALIQPRSFRSLTPRSTRMKRSAPVEKFEGELEHHKRIDYLGDNQNNPDTTIDDKEDEHDTSDLYRLYLDMTGKKNPLDILVVVDKSGSMQEGIGSVQRYRYYAQRWDDYYSQWVYHGTFDYSSYQGESFNRGQIHYRYRGIVSVSDGIRRDDAVKNSLLGVNGLLQRFVNINPENKLSVIGFQGSADYHAGKWYPDQSPRGGFYQPNLNNSRDAELLKGWSTNSLLDPNTLTALHNNGTNYHAALLKAKEILNEVKDDGRRKIMIFISDGVPTFYFGEDGYRSGNGSSNDRNNVTRSQEGSKLAIDEFKARYPNLSIYSLGVSKDINSDTASSSPVVLKYLSGEEHYYGITDTAELEKTLNKIVEDSKLSQLGISDSLSQYVDYYDKQPDVLVTRKSKVNDETEILYQKDQVQEAGKDIIDKVVFTPKTTSQPKGKVTLTFKSDYKVDDEYTYTLSFNVKASDEAYEKYKDNEGRYSEMGDSDTDYGTNQTSSGKGGLPSNSDASVNYMADGREQKLPYKHPVIQVKTVPITFTKVDADNNQKKLAGVEFELRKEDKKIVWEKGTTGSNGQLNFKYLQKGKTYYLYETKAKLGYTLPENPWEVAVANNGDIKVKHPIEGELKSKDGSYMIKNYKIYQLPSSGGRGSQIFIIVGSMTATVALLFYRRQHRKKQY

SEQ ID NO: 191 - protein, 1036 aa, Streptococcus pyogenes; identical to SEQ ID NO: 190

SEQ ID NO: 192 - protein, 764 aa, Streptococcus pyogenes
MNNKKLQKKQDAPRVSNRKPKQLTVTLVGVFLMFLTLVSSMRGAQSIFGEEKRIEEVSVPKIKSPDDAYPWYGYDSYDSSHPYYERFKVAHDLKVNLNGSKSYQVYCFNISSHYPEKKNYSTKNWFQRVDGTGDVFTSYAKTPRVSGEELNKKLLSVMYNAYPKNANGYMDNIEPLNAILVTQYAVWYYSDSSSYTVNTLWDSEVKEGKIKSEQVMLMREALSKLIDPKLEEIAEKKLSHNSKLNIFVPQDKSVQNLLSAEYVPESPPAPGQPPLPPVQTKKTTVIIRKYAKGDYSKLLEGATFSLTSEDVPNFEPIIFQSNSIGKTVELLDGTYTLTETAPPNGYEIAKPTKFRVKQGDVSIVQEDGTEIQNPNKEVAEPYSVEGYDDRSNDGQISSGRPYGKFYYAKNRNATSQVVYCFNANLKSPPESYDNGQEIAPDLGTMQAVKYSHIAGTELWNYAKNPKESDPTTFLKRIKKVIERGYGYQNNQTPEGLTDVQFRAATQLAIYYFTDSANLETLKSYGKPEGEAENLEKYGYHGFQFLESRALEVTRELIAYAENDEDAKIESLDFFIPNNSRYQSLVGTQYHPDDLTNIIRIEDKKLVAPEVTHSLTIKKTVVGELGDKEKEFEFSIRLTDRKGKPVTSPIMSNKETVTWDNGTAKFKLKDGESITFTGLPTGYYYEITETGATDYEISVNGKNAPDGKATKASVKEDETVAFENRKDLVPPTGLTTDGAIYLWLLLLVPLGLWVWLIGRKGLKND

SEQ ID NO: 193 - protein, 747 aa, Streptococcus pyogenes
MNNKKLQKKQDAPRVSNRKPKQLTVTLVGVFLMLLVLIGFEGKVRAAHELVEVPVPIFHNPDPQSDYQWYGYEAYTGGYPKYDLFKTYYHDLRVNLHGSKSYQVYCFNVHKHYPRSSQSFDRKWYKKLDGTAENFDSLAMEPRVRKEELTKKLRAVMYNAYPNDANGIMKDLEPLNAIKVTQEAVWYYSDSAQINPDESFKTEAQSNGINDQQLGLMRKALKELIDPNLGSKYSNKTPSGYRLNVFESHDKTFQNLLSAEYVPDTPPKPGEEPPAKTEKTSVIIRKYAEGDYSKLLEGATLRLTGEDIPDFQEKVFQSNGTGEKIELSNGTYTLTETSSPDGYKIAEPIKFRVVNKKVFIVQKDGSQVENPNKEVGSPYTIEAYNDFDEFGLLSTQNYAKFYYGKNYDGSSQIVYCFNANLKSPPDSEDHGATINPDFTTGDIRYSHIAGSDLIKYANTARDEDPQLFLKHVKKVIENGYHKKGQAIPYNGLTEAQFRAATQLAIYYFTDSVDLTKDRLKDFHGFGDMNDQTLGVAKKIVEYALSDEDSKLTNLDFFVPNNSKYQSLIGTEYHPDDLVDVIRMEDKKQEVIPVTHSLTVKKTVVGELGDKTKGFQFELELKDKTGQPIVDALKTNNQDLVAKDGKYSFNLKHGDTIRIEGLPTGYSYTLKETEAKDYIVTVDNKVSQEAQSASENVTADKEVTFENRKDLVPPTGLTTDGAIYLWLLFLVPFGLLVWLFGRKGLKND

SEQ ID NO: 194 - protein, 756 aa, Streptococcus pyogenes
MNNKKLQKKQDAPRVSNRKPKQLTVTLVGVFLMFLTLVSSMRGAQSIFGEEKRIEEVSVPKIKSPDDAYPWYGYDSYDSSHPYYERFKVAHDLRVNLNGSKSYQVYCFNINSHYPNRKNAFSKQWFKRVDGTGDVFTNYAQTPKIRGESLNNKLLSIMYNAYPKNANGYMDKIEPLNAILVTQQAVWYYSDSSYGNIKTLWASELKDGKIDFEQVKLMREAYSKLISDDLEETSKNKLPQGSKLNIFVPQDKSVQNLLSAEYVPESPPAPGQSPEPPVQTKKTSVIIRKYAEGDYSKLLEGATLRLTGEDILDFQEKVFQSNGTGEKIELSNGTYTLTETSSPDGYKIAEPIKFRVVNKKVFIVQKDGSQVENPNKEVAEPYSVEAYSDMQDSNYINPETFTPYGKFYYAKNKDKSSQVVYCFNADLHSPPESEDGGGTIDPDISTMKEVKYTHTAGSDLFKYALRPRDTNPEDFLKHIKKVIEKGYNKKGDSYNGLTETQFRAATQLAIYYFTDSTDLKTLKTYNNGKGYHGFESMDEKTLAVTKELINYAQDNSAPQLTNLDFFVPNNSKYQSLIGTEYHPDDLVDVIRMEDKKQEVIPVTHSLTVKKTVVGELGDKTKGFQFELELKDKTGQPIVNTLKTNNQDLVAKDGKYSFNLKHGDTIRIEGLPTGYSYTLKETEAKDYIVTVDNKVSQEAQSASENVTADKEVTFENRKDLVPPTGFITDGGTYLWLLLLVPFGLLVWFFGRKGLKND

SEQ ID NO: 195 - protein, 756 aa, Streptococcus pyogenes; identical to SEQ ID NO: 194

SEQ ID NO: 196 - protein, 756 aa, Streptococcus pyogenes; identical to SEQ ID NO: 194

SEQ ID NO: 197 - protein, 754 aa, Streptococcus pyogenes
MNNKKLQKKQDAPRVSNRKPKQLTVTLVGVFLMLLVLIGFEGKVRAAHELVEVPVPIFHNPDPQSDYQWYGYEAYTGGYPKYDLFKTYYHDLRVNLHGSKSYQVYCFNVHKHYPRSSQSFDRKWYKKLDGTAENFDSLAMEPRVRKEELTKKLRAVMYNAYPNDANGIMKDLEPLNAIKVTQEAVWYYSDNSPINPDESFKSEALANKISATQISLMREALKQLIAPDLDEKQSRRVPDGYQLSIFESENKDYQNLLAAEEVPIQPPKPGDKPPLPPVQTKKTSVIIRKYAEGDYSKLLEGATLKLAQIEGSGFQEKIFDSNKSGEKVELPNGTYVLSELKPPQGYRFATPITFKVAAGKVLIKNKEGQFVENQNKEIAEPYSVTAFNDFEEIGYLSDFNNYGKFYYAKNTNGTSQVVYCFNADLHSPPDSYDSGETINPDTSTMKEVKYTHTAGGDLFKYALRPRDTNPEDFLKHIKKVIEKGYKKKGNSYNGLTETQFRAATQLAIYYFTDSTDLKTLKTYNNGKGYHGFESVDEKTLAVTKELITYAQNGSAPQLTNLDFFVPNNSKYQSLIGTEYHPDDLVDVIRMEDKKQEVIPVTHSLTVKKTVVGELGDKTKGFQFELELKDKTGQPIVNTLKTNNQDLVAKDGKYSFNLKHGDTIRIEGLPTGYSYTLKETEAKDYIVTVDNKVSQEAQSASENVTADKEVTFENRKDLVPPTGLTTDGAIYLWLLLLVPLGLWVWLIGRKGLKND

SEQ ID NO: 198 - protein, 754 aa, Streptococcus pyogenes
MNNKKLQKKQDAPRVSNRKPKQLTVTLVGVFLMLLVLIGFEGKVRAAHELVEVPVPIFHNPDPQSDYQWYGYEAYTGGYPKYDLFKTYYHDLRVNLHGSKSYQVYCFNVHKHYPRSSQSFDRKWYKKLDGTAENFDSLAMEPRVRKEELTKKLRAVMYNAYPNDANGIMKDLEPLNAIKVTQEAVWYYSDNSPINPDESFKSEALANKISATQISLMREALKQLIAPDLDEKQSRRVPDGYQLSIFESENKDYQNLLAAEEVPIQPPKPGDKPPLPPVQTKKTSVIIRKYAEGDYSKLLEGATLKLAQIEGSGFQEKIFDSNKSGEKVELPNGTYVLSELKPPQGYRFATPITFKVAAGKVLIKNKEGQFVENQNKEIAEPYSVTAFNDFEEIGYLSDFNNYGKFYYAKNTNGTSQVVYCFNADLHSPPDSYDSGETINPDTSTMKEVKYTHTAGGDLFKYALRPRDTNPEDFLKHIKKVIEKGYKKKGDSYNGLTETQFRAATQLAIYYFTDSTDLKTLKTYNNGKGYHGFESVDEKTLAVTKELITYAQNGSAPQLTNLDFFVPNNSKYQSLIGTEYHPDDLVDVIRMEDKKQEVIPVTHSLTVKKTVVGELGDKTKGFQFELELKDKTGQPIVNTLKTNNQDLVAKDGKYSFNLKHGDTIRIEGLPTGYSYTLKETEAKDYIVTVDNKVSQEAQSASENVTADKEVTFENRKDLVPPTGLTTDGAIYLWLLLLVPLGLWVWLIGRKGLKND

SEQ ID NO: 199 - protein, 754 aa, Streptococcus pyogenes; identical to SEQ ID NO: 197

SEQ ID NO: 200 - protein, 1042 aa, Streptococcus pyogenes
MYSRLKRELVIVINRKKKYKLIRLMVTVGLIFSQLVLPIRRLGLQMISTQTKVIPQEIVTQTETQGTQVVATKQKLESENSSLKVALKRESGFEHNATIDASLDTESQGDNSQRSVTQAIVTMALELRKQGLSIVDTKIVRIQSSTNQRNDITTTLTFKNGLSLEGASTEANDPNVRVGIVNPNDTVQTITPTIKQEADGKVKNLVFTGRLGKQVIIVSTTRLKEEQTISLDSYGELVIDGAVGLSQKDRPPYSKPITVNILKPRLSSIESSLDSKDFEIVKTIDNLYTWDDQFYLLDFISKQYEVLKTDYQSAKDSTSQTRDILFGEYTVEPLVINKGHNNTINIYIRSTRPLGLKPIGAAPALIQPRSFRSLTPRSTRMKRSAPVEKFEGELEHHKRIDYLGDNQNNPDTTIDDKEDEHDTSDIYRLYLDMTGKKQPLDILVVVDRSGSMQDGIGSIEKYKYWKYKYDEYYHIWRNAGTIYFDNYLGPRYQPDTYTYYDYQSKESVPFGIKRDQAVKDALIGSTGLLQKFLDINPQNQLAVVGFQGSVAYRYYDEKPERTPWNTIMYQPSKSTSKDADVLKDWETSSNLSRDSLSYEDRNGTNYHAALLKADEKLQKVANNGHRKIMVFISDGVPTFYFGADNYRSGNGTVSDSNIINSQKGSKLAIDEFKNKYPNLSIYSLGVSKDINSDTSSSSPVVLKYLSGDDYYSGITDTEQLEKTANKIVEDSKISNLTISDTLSQYVNVYDEQPDILVTRKSKKTGAIEIVYKDNRVTEMGRDIIEGVSFTSEKSGNSTGKVTLKFKPDYKIDDEYTYTLSFNVKASDKAYEKYKDEKGKYTVEGDVDTDYNGNQTSSGKGGLPSNSDASVNYMADGREQKLPYKHPVIQVKTVPIMFTKVDADNSQKKLEGVAFELRKADKKTVWEKGITNSTGQLEFNYLQKGKTYYLYETKARIGYTLPENPWEVKVDSKGKITVKHPIEGDLSSKGETYTIKNHKIYQLPSSGGRGSQLFIILGSMLMTTTILLYRRYNYRKKMDKTSL

SEQ ID NO: 201 - protein, 747 aa, Streptococcus pyogenes
MNNKKLQKKQDAPRVSNRKPKQLTVTLVGVFLMLLVLIGFEGKVRAAHELVEVPVPIFHNPDPQSDYQWYGYEAYTGGYPKYDLFKTYYHDLRVNLHGSKSYQVYCFNVHKHYPRSSQSFDRKWYKKLDGTAENFDSLAMEPRVRKEELTKKLRAVMYNAYPNDANGIMKDLEPLNAIKVTQEAVWYYSDSAQINPDESFKTEAQSNGINDQQLGLMRKALKELIDPNLGSKYSNKTPSGYRLNVFESHDKTFQNLLSAEYVPDTPPKPGEEPPAKTEKTSVIIRKYAEGDYSKLLEGATLRLTGEDIPDFQEKVFQSNGTGEKIELSNGTYTLTETSSPDGYKIAEPIKFRVVNKKVFIVQKDGSQVENPNKEVGSPYTIEAYNDFDEFGLLSTQNYAKFYYGKNYDGSSQIVYCFNANLKSPPDSEDHGATINPDFTTGDIRYSHIAGSDLIKYANTARDEDPQLFLKHVKKVIENGYHKKGQAIPYNGLTEAQFRAATQLAIYYFTDSVDLTKDRLKDFHGFGDMNDQTLGVAKKIVEYALSDEDSKLTNLDFFVPNNSKYQSLIGTEYHPDDLVDVIRMEDKKQEVIPVIHSLTVKKTVVGELGDKTKGFQFELELKDKTGQPIVDALKTNNQDLVAKDGKYSFNLKHGDTIRIEGLPTGYSYTLKETEAKDYIVTVDNKVSQEAQSASENVTADKEVTFENRKDLVPPTGFTTDGGTYLWLLLLVPFGLLVWFFGRKGLKND

SEQ ID NO: 202 - protein, 747 aa, Streptococcus pyogenes; identical to SEQ ID NO: 201

SEQ ID NO: 203 - protein, 747 aa, Streptococcus pyogenes
MNNKKLQKKQDAPRVSNRKPKQLTVTLVGVFLMLLVLIGFEGKVRAAHELVEVPVPIFHNPDPQSDYQWYGYEAYTGGYPKYDLFKTYYHDLRVNLHGSKSYQVYCFNVHKHYPRSSQSFDRKWYKKLDGTAENFDSLAMEPRVRKEELTKKLLAVMYNAYPNDANGIMKDLEPLNAIKVTQEAVWYYSDSAQINPDESFKTEAQSNGINDQQLGLMRKALKELIDPNLGSKYSNKTPSGYRLNVFESHDKTFQNLLSAEYVPDTPPKPGEEPPAKTEKTSVIIRKYAEGDYSKLLEGATLRLTGEDIPDFQEKVFQSNGTGEKIELSNGTYTLTETSSPDGYKIAEPIKFRVVNKKVFIVQKDGSQVENPNKEVGSPYTIEAYNDFDEFGLLSTQNYAKFYYGKNYDGSSQIVYCFNANLKSPPDSEDHGATINPDFTTGDIRYSHIAGSDLIKYANTARDEDPQLFLKHVKKVIENGYHKKGQAIPYNGLTEAQFRAATQLAIYYFTDSVDLTKDRLKDFHGFGDMNDQTLGVAKKIVEYALSDEDSKLTNLDFFVPNNSKYQSLIGTEYHPDDLVDVIRMEDKKQEVIPVIHSLTVKKTVVGELGDKTKGFQFELELKDKTGQPIVDALKTNNQDLVAKDGKYSFNLKHGDTIRIEGLPTGYSYTLKETEAKDYIVTVDNKVSQEAQSASENVTADKEVTFENRKDLVPPTGFTTDGGTYLWLLLLVPFGLLVWFFGRKGLKND

SEQ ID NO: 204 - protein, 747 aa, Streptococcus pyogenes; identical to SEQ ID NO: 201

SEQ ID NO: 205 - protein, 747 aa, Streptococcus pyogenes
MNNKKLQKKQDAPRVSNRKPKQLTVTLVGVFLMLLVLIGFEGKVRAAHELVEVPVPIFHNPDPQSDYQWYGYEAYTGGYPKYDLFKTYYHDLRVNLHGSKSYQVYCFNVHKHYPRSSQSFDRKWYKKLDGTAENFDSLALEPRVRKEELTKKLLAVMYNAYPNDANGIMKDLEPLNAIKVTQEAVWYYSDSAQINPDESFKTEAQSNGINDQQLGLMRKALKELIDPNLGSKYSNKTPSGYRLNVFESHDKTFQNLLSAEYVPDTPPKPGEEPPAKTEKTSVIIRKYAEGDYSKLLEGATLRLTGEDIPDFQEKVFQSNGTGEKIELSNGTYTLTETSSPDGYKIAEPIKFRVVNKKVFIVQKDGSQVENPNKEVGSPYTIEAYNDFDEFGLLSTQNYAKFYYGKNYDGSSQIVYCFNANLKSPPDSEDHGATINPDFTTGDIRYSHIAGSDLIKYANTARDEDPQLFLKHVKKVIENGYHKKGQAIPYNGLTEAQFRAATQLAIYYFTDSVDLTKDRLKDFHGFGDMNDQTLGVAKKIVEYALSDEDSKLTNLDFFVPNNSKYQSLIGTEYHPDDLVDVIRMEDKKQEVIPVIHSLTVKKTVVGELGDKTKGFQFELELKDKTGQPIVDALKTNNQDLVAKDGKYSFNLKHGDTIRIEGLPTGYSYTLKETEAKDYIVTVDNKVSQEAQSASENVTADKEVTFENRKDLVPPTGFTTDGGTYLWLLLLVPFGLLVWFFGRKGLKND

SEQ ID NO: 206 - protein, 747 aa, Streptococcus pyogenes; identical to SEQ ID NO: 201

SEQ ID NO: 207 - protein, 756 aa, Streptococcus pyogenes; identical to SEQ ID NO: 189

SEQ ID NO: 208 - protein, 754 aa, Streptococcus pyogenes; identical to SEQ ID NO: 198

SEQ ID NO: 209 - protein, 747 aa, Streptococcus pyogenes
MNNKKLQKKQDAPRVSNRKPKQLTVTLVGVFLMLLVLIGFEGKVRAAHELVEVPVPIFHNPDPQSDYQWYGYEAYTRGYPKYDLFKTYYHDLRVNLHGSKSYQVYCFNVHKHYPRSSQSFDRKWYKKLDGTAENFDSLAMEPRVRKEELTKKLRAVMYNAYPNDANGIIKDLEPLNAIKVTQEAVWYYSDSAQINPDESFKTEAQSNGINDQQLGLMRKALKELIDPNLGSKYSNKTPSGYRLNVFESHDKTFQNLLSAEYVPDTPPKPGEEPPAKTEKTSVIIRKYAEGDYSKLLEGATLRLTGEDIPDFQEKVFQSNGTGEKIELSNGTYTLTETSSPDGYKIAEPIKFRVVNKKVFIVQKDGSQVENPNKEVGSPYTIEAYNDFDEFGLLSTQNYAKFYYGKNYDGSSQIVYCFNANLKSPPDSEDHGATINPDFTTGDIRYSHIAGSDLIKYANTARDEDPQLFLKHVKKVIENGYHKKGQAIPYNGLTEAQFRAATQLAIYYFTDSVDLTKDRLKDFHGFGDMNDQTLGVAKKIVEYALSDEDSKLTNLDFFVPNNSKYQSLIGTEYHPDDLVDVIRMEDKKQEVIPVTHSLTVQKTVVGELGDKTKGFQFELELKDKTGQPIVDALKTNNQDLVAKDGKYSFNLKHGDTIRIEGLPTGYSYTLKETEAKDYIVTVDNKVSQEAQSASENVTADKEVTFENRKDLVPPTGLTTDGAIYLWLLLLVPLGLWVWLIGRKGLKND

SEQ ID NO: 210 - protein, 747 aa, Streptococcus pyogenes; identical to SEQ ID NO: 209

SEQ ID NO: 211 - protein, 747 aa, Streptococcus pyogenes; identical to SEQ ID NO: 209

SEQ ID NO: 212 - protein, 747 aa, Streptococcus pyogenes; identical to SEQ ID NO: 209

SEQ ID NO: 213 - protein, 747 aa, Streptococcus pyogenes; identical to SEQ ID NO: 209

SEQ ID NO: 214 - protein, 477 aa, Streptococcus pyogenes
EEKSTETKKTSVIIRKYAEGDYSKLLEGATLRLTGEDIPDFQEKVFQSNGTGEKIELSNGTYTLTETSSPDGYKITEPIKFRVVNKKVFIVQKDGSQVENPNKELGSPYTIEAYNDFDEFGLLSTQNYAKFYYGKNYDGSSQIVYCFNANLKSPPDSEDHGATINPDFTTGDIRYSHIAGSDLIKYANTARDEDPQLFLKHVKKVIENGYHKKGQAIPYNGLTEAQFRAATQLAIYYFTDSVDLTKDRLKDFHGFGDMNDQTLGVAKKIVEYALSDEDSKLTNLDFFVPNNSKYQSLIGTEYHPDDLVDVIRMEDKKQEVIPVTHSLTVQKTVVGELGDKTKGFQFELELKDKTGQPIVNTLKTNNQDLVAKDGKYSFNLKHGDTIRIEGLPTGYSYTLKETEAKDYIVTVDNKVSQEAQSASENVTADKEVTFENRKDLVPPTGLTTDGAIYLWLLLLVPFGLLVWLFGRKGLKND

SEQ ID NO: 215 - protein, 440 aa, Streptococcus pyogenes
  VARIANT (1)...(440): Xaa = Any Amino Acid
AEEKSTETKKTSVIIRKYAEGDYSKLLEGATLRLTGEDIPDFQEKVFQSNGTGEKIELSNGTYTLTETSSPDGYKITEPIKFRVVNKKVFIVQKDGSQVENPNKELGSPYTIEAYNDFDEFGLLSTQNYAKFYYGKNYDGSSQIVYCFNANLKSPPDSEDHGATINPDFTTGDIRYSHIAGSDLIKYANTARDEXXXXXXXXXXXXXENXYHKKGQAIPYNGLTEAQFRAATQLAIYYXTDSVDLTKDRLKDFHGFGDMNDQTLGVAKKIVEYALSDEDSKLTNLDFFVPNNSKYQSLIGTEYHPDDLVDVIRMEDKKQEVIPVTHSLTVQKTVVGELGDKTKGFQFELELKDKTGQPIVNTLKTNNQDLVAKDGKYSFNLKHGDTIRIEGLPTGYSYTLKETEAKDYIVTVDNKVSQEAQSASENVTADKEVTFENRKD

SEQ ID NO: 216 - protein, 703 aa, Streptococcus pyogenes
MNNKKLQKKQDAPRVSNRKPKQLTVTLVGVFLMLLVLIGFEGKVRAAHELVEVPVPIFHNPDPQSDYQWYGYEAYTRGYPKYDLFKTYYHDLRVNLHGSKSYQVYCFNVHKHYPRSSQSFDRKWYKKLDGTAENFDSLAMEPRVRKEELTKKLRAVMYNAYPNDANGIIKDLEPLNAIKVTQEAVWYYSDSAQINPDESFKTEAQSNGINDQQLGLMRKALKELIDPNLGSKYSNKTPSGYRLNVFESHDKTFQNLLSAEYVPDTPPKPGEEPPAKTEKTSVIIRKYAEGDYSKLLEGATLRLTGEDIPDFQEKVFQSNGTGEKIELSNGTYTLTETSSPDGYKIAEPIKFRVVNKKVFIVQKDGSQVENPNKEVGSPYTIEAYNDFDEFGLLSTQNYAKFYYGKNYDGSSQIVYCFNANLKSPPDSEDHGATINPDFTTGDIRYSHIAGSDLIKYANTARDEDPQLFLKHVKKVIENGYHKKGQAIPYNGLTEAQFRAATQLAIYYFTDSVDLTKDRLKDFHGFGDMNDQTLGVAKKIVEYALSDEDSKLTNLDFFVPNNSKYQSLIGTEYHPDDLVDVIRMEDKKQEVIPVTHSLTVQKTVVGELGDKTKGFQFELELKDKTGQPIVDALKTNNQDLVAKDGKYSFNLKHGDTIRIEGLPTGYSYTLKETEAKDYIVTVDNKVSQEAQSASENVTADKEVT

SEQ ID NO: 217 - protein, 215 aa, Streptococcus pyogenes
MKKSILRILAIGYLLMSFCLLDSVEAENLTASINIEVINQVDVATNKQSSDIDETFMFVIEALDKESPLPNSVTTSVKGNGKTSFEQLTFSEVGQYHYKIHQLLGKNSQYHYDETVYEVVIYVLYNEQSGALETNLVSNKLGETEKSELIFKQEYSEKTPEPHQPDTTEKEKPQKKRNGILPSTGEMVSYVSALGIVLVATITLYSIYKKLKTSK

SEQ ID NO: 218 - protein, 307 aa, Streptococcus pyogenes
MKQTLKLMVSFLVMLGTMFGISQTVLAQGTHQLTIVHLEARDIDRPYPQLDIAPKEGTPTEGVLYQLYQLKSTEDGDLLAHWNSLTITELKKQAQQVFEATTNQQGKATFNQLPDGIYYGLAVKAGEKDRNVSAFLVDLSEDKVIYPKIIWSTGELDLLKVGVDGDTKKPLAGVVFELYEKDGMVPIRVKNGVHSQDIDAAKRLETDSSGHIRISGLIPGDYVLKEIETRSGYQIDQSETAVTIEKSKTVTVTIKNQKIPSPKVPPRGGFIPKTGEQQAMILVIIGGILIALALRLLSKHRKNQDKH

SEQ ID NO: 219 - protein, 307 aa, Streptococcus pyogenes; identical to SEQ ID NO: 218

SEQ ID NO: 220 - protein, 307 aa, Streptococcus pyogenes; identical to SEQ ID NO: 218

SEQ ID NO: 221 - protein, 307 aa, Streptococcus pyogenes; identical to SEQ ID NO: 218

SEQ ID NO: 222 - protein, 183 aa, Streptococcus pyogenes
MILTMLAFNQTVLAKDSTVQTSISVENVLERAGDSTPFSIALESIDAMKTIEEITIAGSGKASFSPLTFTTVGQYTYRVYQKPSQNKDYQADTTVFDVLVYVTYDEDGTLVAKVISRRAGDEEKSAITFKPKWLVKPIPPRQPNIPKTPLPLAGEVKSLLGILSIVLLGLLVLLYVKKLKSRL

SEQ ID NO: 223 - protein, 183 aa, Streptococcus pyogenes; identical to SEQ ID NO: 222

SEQ ID NO: 224 - protein, 281 aa, Streptococcus pyogenes
MGGTQLKIGRLIRLMLSICACLYFLTSPIFALQKTSSVTIHFENSDKDTQLALWQLPEGQTLPELETLFEKTDAELTRQYPQVSTVTVPKGETKLVLSNLPVGAIYYVREAEERLGVRSLAPFILKVDTDDDQAVYTKKAKAQKRGSYPFVKVSAQGGSLEGATFEVWKQTQKQLQPVIKGSSRYLLTSSKDGSFMARDLPFGSYVLKEITAPKGYLLSKKTIPFEVTDYSEKQAPVKVVNQPKIPPRIEIPYTGNAIMILVVLLGFALFTLGVYLVRRNG

SEQ ID NO: 225 - protein, 281 aa, Streptococcus pyogenes; identical to SEQ ID NO: 224

SEQ ID NO: 226 - protein, 281 aa, Streptococcus pyogenes; identical to SEQ ID NO: 224

SEQ ID NO: 227 - protein, 189 aa, Streptococcus pyogenes
MLFSVVMILTMLAFNQTVLAKDSTVQTSISVENVLERAGDSTPFSIALESIDAMKTIEEITIAGSGKASFSPLTFTTVGQYTYRVYQKPSQNKDYQADTTVFDVLVYVTYDEDGTLVAKVIPRRAGDEEKSAITFKPKRLVKPIPPRQPDIPKTPLPLAGEVKSLLGILSIVLLGLLVLLYVKKLKSRL

SEQ ID NO: 228 - protein, 189 aa, Streptococcus pyogenes
MLFSVVMILTMLAFNQTVLAKDSTVQTSISVENVLERAGDSTPFSIALESIDAMKTIEEITIAGSGKASFSPLTFTTVGQYTYRVYQKPSQTKDYQADTTVFDVLVYVTYDEDGTLVAKVIPRRAGDEEKSAITFKPKRLVKPIPPRQPDIPKTPLPLAGEVKSLLGILSIVLLGLLVLLYVKKLKSRL

SEQ ID NO: 229 - protein, 189 aa, Streptococcus pyogenes
MLFSVVMILTMLAFNQTVLAKDSTVQTSISVENVLERAGDSTPFSIALESIDAMKTIEEITIAGSGKASFSPLTFTTVGQYTYRVYQKPSQNKDYQADTTVFDVLVYVTYDEDGTLVAKVISRRAGDEEKSAITFKPKRLVKPIPPRQPDIPKTPLPLAGEVKSLLGILSIVLLGLLVLLYVKKLKSRL

SEQ ID NO: 230 - protein, 189 aa, Streptococcus pyogenes
MLFSVVMILTMLAFNQTVLAKDSTVQTSISVENVLERAGDSTPFSIALESIDAMKTIEEITIAGSGKASFSPLTFTTVGQYTYRVYQKPSQNKDYQADTTVFDVLVYVTYDEDGTLVAKVISRRAGDEEKSAITFKPKRLVKPIPPRQPNIPKTPLPLAGEVKSLLGILSIVLLGLLVLLYVKKLKSKL

SEQ ID NO: 231 - protein, 189 aa, Streptococcus pyogenes; identical to SEQ ID NO: 230

SEQ ID NO: 232 - protein, 189 aa, Streptococcus pyogenes; identical to SEQ ID NO: 230

SEQ ID NO: 233 - protein, 189 aa, Streptococcus pyogenes
MLFSVVMILTMLAFNQTVLAKDNTVQTSISVENVLERAGDSTPFSIALESIDAMKTIEEVTIAGSGKASFSPLTFTTVGQYTYRVYQKPSQNKDYQADTTVFDVLVYVTYDEDGTLVAKVISRRAGDEEKSAITFKPKRLVKPIPPRQPDIPKTPLPLAGEVKSLLGILSIVFLGLLVLLYVKKLKSRL

SEQ ID NO: 234 - protein, 189 aa, Streptococcus pyogenes; identical to SEQ ID NO: 233

SEQ ID NO: 235 - protein, 189 aa, Streptococcus pyogenes
MLFSVVMILTMLAFNQTVLAKDNTVQTSISVENVLERAGDSTPFSIALESIDAMKTIEEVTIAGSGKASFSPLTFTTVGQYTYRVYQKPSQNKDYQADTTVFDVLVYVTYDEDGTLVAKVISRRAGDEEKSAITFKPKRLVKPIPPRQPDIPKTPLPLAGEVKSLLGILSIVLLGLLVLLYVKKLKSRL

SEQ ID NO: 236 - protein, 189 aa, Streptococcus pyogenes
MLFSVVMILTMLAFNQTVLAKDSTVQTSISVENVLERAGDSTPFSIALESIDAMKTIEEITIAGSGKASFSPLTFTTVGQYTYRVYQKPSQNKDYQADTTVFDVLVYVTYDEDETLAAKVISRRAGDEEKSAITFKPKRLVKPIPPRQPDIPKTPLPLAGEVKSLLGILSIVLLGLLVLLYVKKLKSRL

SEQ ID NO: 237 - protein, 189 aa, Streptococcus pyogenes; identical to SEQ ID NO: 236

SEQ ID NO: 238 - protein, 189 aa, Streptococcus pyogenes; identical to SEQ ID NO: 236

SEQ ID NO: 239 - protein, 189 aa, Streptococcus pyogenes; identical to SEQ ID NO: 236

SEQ ID NO: 240 - protein, 189 aa, Streptococcus pyogenes; identical to SEQ ID NO: 236

SEQ ID NO: 241 - protein, 189 aa, Streptococcus pyogenes; identical to SEQ ID NO: 236

SEQ ID NO: 242 - protein, 189 aa, Streptococcus pyogenes
MLFSVVMILTMLAFNQTVLAKDSTVQTSISVENVLERAGDSTPFSVALESIDAMKTIDEITIAGSGKASFSPLTFTTVGQYTYRVYQKPSQNKDYQADTTVFDVLVYVTYDEDGTLVAKVISRRAGDEEKSAITFKPKRLVKPIPPRQPNIPKTPLPLAGEVKSLLGILSIVLLGLLVLLYVKKLKSRL

SEQ ID NO: 243 - protein, 189 aa, Streptococcus pyogenes; identical to SEQ ID NO: 227

SEQ ID NO: 244 - protein, 189 aa, Streptococcus pyogenes; identical to SEQ ID NO: 235

SEQ ID NO: 245 - protein, 310 aa, Streptococcus pyogenes
MQKLLKYLCSFGVVLGLLLGFPGQVLAQGDQAQLTVVHLESRDVDRPNPQLDLAPSAGKPVEGITYRLYQLKLGREAQPISYWEKLTLQALEEQAQTVFEAKTDAQGHAAFLQLPIGIYYGVAVENQQRQAGIAGFLVDLTGDTGYVKTVYPKVIWPTGGLHLIKYGVDGQTKVPLAGVRFELYEDNGFKPLRVKDGLHSYDLDAKTTLITNQEGQLKVAGLLAGNYYLKEVATAKGYRLKTDAISFQVQAHQTKTVSVDNQKEPPPPVTPWDWIPRTGEAQALTLIVLGLILMLLALFYYQKHRQEGND

SEQ ID NO: 246 - protein, 189 aa, Streptococcus pyogenes; identical to SEQ ID NO: 242

SEQ ID NO: 247 - protein, 189 aa, Streptococcus pyogenes
MLFSVVMILTMLAFNQTVLAKDSTVQTSISVENVLERAGDSTPFSIALESIDAMKTIEEITIAGSGKASFSPLTFTTVGQYTYRVYQKPSQNKDYQADTTVFDVLVYVTYDEDGTLVAKVISRRAGDEEESAITFKPKRLVKPIPPRQPNIPKTPLPLAGEVKSLLGILSIVLLGLLVLLYVKKLKSKL

SEQ ID NO: 248 - protein, 189 aa, Streptococcus pyogenes; identical to SEQ ID NO: 230

SEQ ID NO: 249 - protein, 189 aa, Streptococcus pyogenes; identical to SEQ ID NO: 230

SEQ ID NO: 250 - protein, 189 aa, Streptococcus pyogenes; identical to SEQ ID NO: 230

SEQ ID NO: 251 - protein, 189 aa, Streptococcus pyogenes; identical to SEQ ID NO: 230

SEQ ID NO: 252 - protein, 189 aa, Streptococcus pyogenes; identical to SEQ ID NO: 230

SEQ ID NO: 253 - DNA, 2274 bp, Streptococcus pyogenes
atgaaaaaaacaaggtttccaaataagcttaatactcttaatactcaaagggtattaagtaaaaactcaaaacgatttactgtcactttagtgggagtctttttaatgatcttcgctttggtaacttccatggttggtgctaagactgtttttggtttagtagaatcctcgacgccaaacgcaataaatccagattcaagttcggaatacagatggtatggatatgaatcttatgtaagagggcatccatattataaacagtttagagtagcacacgatttaagggttaacttagaaggaagtagaagttatcaagtttattgctttaatttaaagaaagcatttcctctcggatcagatagtagtgttaaaaagtggtataaaaaacatgatggaatctctacaaaatttgaagattatgcgataagccctagaattacgggagatgagctaaatcagaagttacgagctgttatgtataatggacatccacaaaatgccaatggtattatggaaggcttggaacccttgaatgctatcagagttacacaagaggcggtatggtactattctgataatgctcctatttctaatccagatgaaagttttaaaagggagtcagaaagtaacttggttagtacttctcaattatctttgatgcgtcaagctttgaagcaactgattgatccgaatttggcaactaaaatgccaaaacaagttccggatgattttcagctaagtatttttgagtctgaggacaagggagataaatataataaaggataccaaaatcttttgagtggtggtttagttcctactaaaccaccaactccaggagacccaccaatgcctccaaatcaacctcaaacgacttcagtacttattagaaagtatgctataggtgattactctaaattgcttgaaggtgcaacattacagttgacaggggataacgtgaatagttttcaagcgagagtgtttagcagtaatgatattggagaaagaattgaactatcagatggaacttatactttaactgaattgaattctccagctggttatagtatcgcagagccaatcacttttaaggttgaagctggcaaagtgtatactattattgatggaaaacagattgaaaatcccaataaagagatagtagagccttactcagtagaagcatataatgattttgaagaatttagcgttttaactacacaaaactatgcaaaattttattatgcaaaaaataaaaatggaagttcacaggttgtctattgctttaatgcagatctaaaatctccaccagactctgaagatggtgggaaaacaatgactccagactttacaacaggagaagtaaaatacactcatattgcaggtcgtgacctctttaaatatactgtgaaaccaagagataccgatcctgacactttcttaaaacatatcaaaaaagtaattgagaagggttacagggaaaaaggacaagctattgagtatagtggtctaactgagacacaattgcgtgcggctactcagttagcaatatattatttcactgatagtgctgaattagataaggataaactaaaagactatcatggttttggagacatgaatgatagtactttagcagttgctaaaatccttgtagaatacgctcaagatagtaatcctccacagctaactgaccttgatttctttattccgaataacaataaatatcaatcccttattggaactcagtggcatccagaagatttagttgatattattcgtatggaagataaaaaagaagttatacctgtaactcataatttaacattgagaaaaacggtgactggtttagctggtgacagaactaaagatttccattttgaaattgaattaaaaaataataagcaagaattgctttctcaaactgttaaaacagataaaacaaacctcgaatttaaagatggtaaagcaaccattaatttaaaacatggggaaagtttaacacttcaaggtttaccagaaggttattcttaccttgtcaaagaaacagattctgaaggctataaggttaaagttaatagccaagaagtagcaaatgctacagtttcaaaaacaggaataacaagtgatgagacacttgcttttgaaaataataaagagcctgttgttcctacaggagttgatcaaaagatcaatggctatctagctttgatagttatcgctggtatcagtttggggatctggggaattcacacgataaggataagaaaacatgactag

SEQ ID NO: 254 - DNA, 2673 bp, Streptococcus pyogenes
atgaaaaagaaacaaaaactatggagagggttatcagttactttactaatcctatcccaaatcccctttggtatattagtacaaggggaaactcaagataacaatccagcacttggaaaagtaattgttaaaaaaacgggagaaaatgctatgccattaggcaaagctacttttgtgttgaaaaatgaccatgataagtcagaaataagtcacgagacagtagagggttctggggaagcggcttttgaaaacataaaaccgggaaactacacattaacggaaaaaacagcaccaattggttataaaaaaactgataaaacctggaaagttaaagttgcagataatggggcaacaacgattgaggatatagatccagataaggtggagaaacgaaaagaagctttgaatggacaatatccagaatcagctatttatgaggatacaaaagaaagttatccattagttaaggtagaagattccaaagttggtaatcagtacaaagctctaaatcctatcaatggagaagatggtcgaagagagattacggaaggttggctatcaaaaaaaatcaaaaaggttaatgaactcgataagaataaatataagattgaattgactgttgaagggaaaactatcgttgagacaaaagaacttaatcaaccattagatgttgttctgctattggataattcaaatagtatgaataatgaaagagcccacaattctcaaagagcattaaaagctggggaagcagttgaaaagctgattgataaaattacatcaaataaagacaatagagtagctcttgtgacatatgcctcaaccatttttgatggtactgaagcgactgtatcaaagggagttgccgatcgaaatggtaaagcgcttaatgatagtgtatcatgggattatcataaaaccacttttacagcaactacacataattacagttatttaaatttaacaaatgatgctaacgaagttaatattctaaagtcaagaattccaaaggaagcggagcatataaatgggaatcgcacgctctatcaatttggtgcgacatttactcaaaaagctctaatgaaagcaaatgaaattttagagacacaaagttctaatgatagaaaaaaagttatttttcacgtaactgatggtgtccctacgatgtcttatgccataaattttaatccttatatatcaacatcttaccaaaaccagtttaaatcttttttaaataaaacaccagatagaagtggtattctccaagaggattttataatcaatggtgatgattaccaaatagtaaaaggagacggagagagttttaaactgttttcggatagaaaagttcctgttcctggaggaacgacacaagcagcttatcaagtaccgcaaaatcaactctctgtaatgagtaatgagggatatgcaattaatagaggatatatttatctctattggagagattacaactgggtctatccatttgatcctaagacaaagacagtttctgcaacgaaacaaatcaaaactcatggtgagccaacaacgttatactttaatggaaatataaaacctaaaggttatgacatctttactgttgggattggtgtaaacggagatcctggtgcaactcctcttgaagctaaggaatttatgcaatcaatatcaagtaaaacagaaaattatactaatgttgatgatacaaataaaatttatgatgagctaaataaatactttaaaacaattgttgaggaaaaacattctattgttgatggaaatgtgactgatcctatgggagagatgattgaattccaattaaaagatggtcaaagctttacacatgatgattacgttttggttggaaatgatggtagtcaattaaaaaatggtgtggctcttggtggaccaaacagtgatgggggaattttaaaagatgttacagtgacttatgataagacatctcaaaccatcaaaatcaatcatttgaacttaggaagtggacaaaaagtagttcttacctatgatgtacgtttaaaagagaactatataagtaacaaattttacaatacaaataatcgtacaacgctaagtccgaagagtgaaaaagaaccaaatactattcgtgatttcccaattccaaaaattcgtgatgttcgggagtttccggtactaactatcagtaatcagaagaaaatgggtgaggttgaatttattaaagttaataaagacaaacattcagaatcgcttttgggggctaagtttcaacttcagatagaaaaagatttttctgggtataagcaatttgttccagagggaagtgatgtcacaacaaagaatgatggtaaaatttattttaaagcacttcaagatggtaactataaattatatgaaatttcaagtccagacggctatatagaggttaaaacgaaacctgttgtgacatttacaattcaaaatggagaagttacgaacctgaaacaagatccaaatgctaataaaaatcaaatcggatattttgaagaagatggaaaacatcttattaccaatactccaaaacgtccaccgagtgtttttcctaaaaccggaggaattggtacgattgtctatatattagtcggctgtactcttatgatagttgctactggttctttccgtcgtaatcaacagtaa

SEQ ID NO: 255 - DNA, 2673 bp, Streptococcus pyogenes; identical to SEQ ID NO: 254

SEQ ID NO: 256 - DNA, 2673 bp, Streptococcus pyogenes; identical to SEQ ID NO: 254

SEQ ID NO: 257 - DNA, 2673 bp, Streptococcus pyogenes; identical to SEQ ID NO: 254

SEQ ID NO: 258 - DNA, 2235 bp, Streptococcus pyogenes
ttgcaaaagagggataaaaccaattatggaagcgctaacaacaaacgacgacaaacgacgatcggattactgaaagtatttttgacgtttgtagctctgataggaatagtagggttttctatcagagcgttcggagctgaagaacaatcagtgccaaataaacaaagctcagttcaagattatccgtggtatggctatgattcttattctaaaggctacccagactatagtccgttaaagacttaccataatttaaaagtaaatttagatggaagtaaggagtatcaagcatactgctttaatttaacaaaacactttccatccaagtcagatagtgttagatcacaatggtataaaaaacttgaaggaactaatgaaaactttatcaagttagcagataaaccaagaatagaagacggacagttacaacaaaatatattgaggattctctataatggatatcctaatgatcgtaatgggataatgaaagggatagatcctctaaacgctattttagtgactcaaaatgctatttggtactatactgatagttcctatatttctgatactagtaaagcttttcaacaagaagaaacagatcttaaattagattcacagcaactacaactaatgcgtaatgcgctaaaaagattaattaatccaaaagaggtagaaagtttaccgaatcaggttcccgcaaattatcagttaagtatttttcaatcttctgataagactttccaaaatcttttaagtgctgagtatgttccggatactcccccaaaaccaggagaagagcctccggctaaaactgaaaaaacatcagtcattatcagaaaatatgcggaaggtgactactctaaacttctagagggagcaaccttaaagcttgctcaaattgaaggaagtggttttcaggagaaaatttttgatagtaacaagtctggagagaaagtagagctacctaatgggacttacgttttaagtgagctaaaacctcctcaaggatatggagttgccacacccattacttttaaagttgcagctgagaaagttttaataaaaaataaagaaggtcaatttgtagagaaccaaaataaggaaatcgcagagccatattctgtaacagctttcaatgactttgaagagattggttatttatctgattttaataactatggtaagttttactatgcaaaaaatactaatggaactaatcaagttgtctactgtttcaatgctgatttacactcaccacctgactcatatgatcacggagcaaatattgatcctgatgtcagtgaaagtaaagagataaagtatacacatgtttctggctatgatttgtataaatatgcagccacaccaagagacaaagatgctgatttcttcttaaaacatatcaagaaaattcttgataaaggttataagaagaagggggatacctataagacattaactgaagctcagtttaaagcaccaacccaattatctatttattactatacagatagtgctgatttaacaacacttaaaacatataatgataacaagggttatcatggttttgataaactggatgatgcaacattagctgtagttcatgagttgatcacctatgctgaggatgtcaccttaccaatgactcaaaatctatatttctttgttcctaatagcagtagataccaggcacttattggaacgcagtatcatccaaatgaattgattgatgttatttctatggaaaataaacaggctcctattattcctattactcacaagttaactatttctaaaactgttactggaactattgcaaataaaaaaaaagaatttaactttgaaatacatttaaaatcttctgatggacaagctataagtggaacatatccgacaaactctggagaactcacagttacagatggaaaagctaccttcacattaaaggatggagaatcattgattgttgaggggctaccttcaggttactcttatgaaattacagaaacgggtgcttcagattatgaggtaagtgttaatggaaaaaatgcaccagatggaaaagcgacgaaagcctcagttaaggaagatgagactgtagcttttgaaaaccgaaaagatcttgtcccaccaactggtttgacaacagatggggctatctatctttggttgttattacttgttccatttgggttattggtttggctatttggtcgtaaagggactaaaaaatga

SEQ ID NO: 259 - DNA, 2235 bp, Streptococcus pyogenes
ttgcaaaagagggataaaaccaattatggaagcgctaacaacaaacgacgacaaacgacgatcggattactgaaagtatttttgacgtttgtagctctgataggaatagtagggttttctatcagagcgttcggagctgaagaacaatcagtgccaaataaacaaagctcagttcaagattatccgtggtatggctatgattcttattctaaaggctacccagactatagtccgttaaagacttaccataatttaaaagtaaatttagatggaagtaaggagtatcaagcatactgctttaatttaacaaaacactttccatccaagtcagatagtgttagatcacaatggtataaaaaacttgaaggaactaatgaaaactttatcaagttagcagataaaccaagaatagaagacggacagttacaacaaaatatattgaggattctctataatggatatcctaatgatcgtaatgggataatgaaagggatagatcctctaaacgctattttagtgactcaaaatgctatttggtactatactgatagttcctatatttctgatactagtaaagcttttcaacaagaagaaacagatcttaaattagattcacagcaactacaactaatgcgtaatgcgctaaaaagattaattaatccaaaagaggtagaaagtttaccgaatcaggttcccgcaaattatcagttaagtatttttcaatcttctgataagactttccaaaatcttttaagtgctgagtatgttccggatactcccccaaaaccaggagaagagcctccggctaaaactgaaaaaacatcagtcattatcagaaaatatgcggaaggtgactactctaaacttctagagggagcaaccttaaagcttgctcaaattgaaggaagtggttttcaggagaaaatttttgatagtaacaagtctggagagaaagtagagctacctaatgggacttacgttttaagtgagctaaaacctcctcaaggatatggagttgccacacccattacttttaaagttgcagctgagaaagttttaataaaaaataaagaaggtcaatttgtagagaaccaaaataaggaaatcgcagagccatattctgtaacagctttcaatgactttgaagagattggttatttatctgattttaataactatggtaagttttactatgcaaaaaatactaatggaactaatcaagttgtctactgtttcaatgctgatttacactcaccacctgactcatatgatcacggagcaaatattgatcctgatgtcagtgaaagtaaagagataaagtatacacatgtttctggctatgatttgtataaatatgcagccacaccaagagacaaagatgctgatttcttcttaaaacatatcaagaaaattcttgataaaggttataagaagaagggggatacctataagacattaactgaagctcagtttagagcagcaacccaattagctatttattactatacagatagtgctgatttaacaacacttaagacatataatgataacaagggttatcatggttttgataaactggatgatgcaacattagctgtagttcatgagttgatcacctatgctgaggatgtcaccttaccaatgactcaaaatctagatttctttgttcctaatagcagtagataccaggcacttattggaacgcagtatcatccaaatgaattgattgatgttatttctatggaagataaacaggctcctattattcctattactcacaagttaactatttctaaaactgttactggaactattgcagataagaaaaaagaatttaactttgaaatacatttaaaatcttctgatggacaagctataagtggaacatatccgacaaactctggagaactcacagttacagatggaaaagctaccttcacattaaaggatggagaatcattgattgttgaggggctaccttcaggttactcttatgaaattacagaaacgggtgcttcagattatgaggtaagtgttaatggaaaaaatgcaccagatggaaaagcgacgaaagcctcagttaaggaagatgagactgtagcttttgaaaaccgaaaagatcttgtcccaccaactggtttgacaacagatggggctatctatctttggttgttattacttgttccatttgggttattggtttggctatttggtcgtaaagggactaaaaaatga

SEQ ID NO: 260 - DNA, 4104 bp, Streptococcus pyogenes
atgtacagtagattgaagagagagttagttatagtgataaacagaaaaaagaaatataaactaattagactgatggttaccttaggccttattttttcgcagttagcacctccttttgggactttaatggctttatcaggacattcgaggtcaaaaagtcctgtcacagaagtcaaagctgataatgtgagtaccctgaagacaggaagttttaagctcaaaaaatttgatgaagatggaaaaacacccattaaggatgtaacgtttcagttaacatcggagaccaatccgtcaaactataagattgaacaaataactagtggtgcaggtgatgctagcttcgctaatatccctccaggaacttaccttttaaaggaagtggcaccgccaagtggctatcaggtgatggctgattactataggataaccgtcagtccagacgggtacacacaatatacttatgtcaaagtagggacaacgactagtagtccgacaacctctcttccttcgacaagtggtggtggaacaggcgggacagtctttaggacgtcaaaaacctctggcgtagtgacagtaactgactataactttacaactaaaaataaagcacaaggaaatacagattatacaacattatgggcgacatcgggagagtttttcgatatgtcctttaaattgaaggtcaacgaaggaacacaagcgggtgattcttttaccataaagctaagcgactacttatctccaaatggtattcgtgaaaaattcatctcggcacctcctttgatgctcgataagaaagtggttgccacagggatttatgatgagtccaccaatagctacatctatacctttaatgatctcattaatcataaacaaaacgctgaaataacagtcaattacaccttcagtccagaagccaaaaaagttgatagagactggtatgtaaatacctacaatattacaaatatcattgacggtcagaagcaagattctggtaactttacgatcgactatggtcaaggtcagtatatgacagggacattaaatagtggcttaaggttaaggaataacattacttaccttaatcggacaactggcgaagttgaatataccatttacttaaataatggagcatcacctagagataaagattttactgtaaaaaaccctgtaacaggtcgtcattttctaaacttagaggataaatcagccagtgttgcatttacccaaaaaaacataactgtctatagggttcctttaagtcaaaaaacaagcaagatgccctacagtatgtcgggggagacagatggactagaatcaataccatttgactacagcagtaagggcattacctttactaaagaatcgttccatgataacgaaactaatagtaataccgcaggattattaataaaaataaaagcatatataacagctgacaataaacgatcagcagatgtttctcttagtgcaggatggacttatactaatttaattaggtctaggtcagatgccaaagccagtgcttttgagttaggaaacacatcatctggggtggccaataatattgagcctactgtgaccattcgtaactataaaataaaaaaaggttcaatcgtctttacaaagcaagatgttgaaaccaagatgactttgagtggtgttgcctttagattagagaaaaaagaagaaaatgactggcaaattgtcgagaaatacaaggatgtccagaccggaacagaaggcaagttaatcctgtcagacttagatccaggagaatatcaattaattgaaacaaaacctttagatgggtatttagtttcatcagggcctgttgtgacttttaccataacagatcagggaacagaaggcacagttaagccatcggataaaatcatcccgaacacgaagccagggaaacaaaagattaaagtcatcaaaaaggatgagcaaagcagggtaccattagccggagccaagtttcagcttgagtccaataagggtgtggtactaactggtgagacagatggtaagggagagtatacctttacaaacttaccatttggtgactacattttgacagagattgccgcgccaaaaggatacattttggataaaacacctcgctctattgcaataggagatacagtggataaagagccagaacctacggttgtggaagctgctaccccaaggacagtccgatcagtgagtccttcagcaacagtgtccgacaaagatgtgtccagaaatattctagtcaaaaaagttgaatttactacaacaaatggccaaactcccttacaagttaaacctaatcaaggtgaaaacctgattgctcgatcagaatttgaacttaagaaagagattgatattaagaagggagattattttgcggttaaactctcagataatatagatccctttggggtttcaacaggagaaacaacaacctttaacatcactggtccttatggtaccttagctgttggtaagtatgatagcaagagccgaagtattatttataccttcacagactatgttgaaaaatatgaggtttcaaatttttcaacgatcttaccatactttatagatcgttatgctgttactagagatgctgatattaatatctcaacaagcgttgggagtcagacaaatactgcaagggttagagtactatacacgccttactatggagctacagatagttactctccagtaaacattggatcaatgataacaaaattagatgaaaaaaatggaacttttacaaattatatttacattaatccaatgcagcaatttatccgaaatggtaaattaacattccagggaggagggtcagctattattgacaatgaaacgcaggtgactctgttcaaagttaataatagtacggatatgcctccaagttgggggataactgattcaaccttaagagtagaaaatgatatattggttaataagaaacaaggggaaatatctgtagattttgaaaatattttagaggcacgtaattcatttattatgaaagtagttggaaaaatcgcttcctcaggcacatccgtaaggacaagcgcaacattatcacagaaatacgataacacttacggctattattcaacaaatggacgctggattcccaagggtccgtattcggaatattatagatatgatactacagctattttacactcaggggatagtaacgtcgacggagccattaggatatcagtgactaatcgtaaaaatagtgtagcatttactaaaacaaatggtctggaaaaaccattggaagctacctttgagttacgccgattgaattctaataagacttttacttctgtgaaaacaacaaagtcaactaaagatacgggtaaatttagctttgaaggcatggaatctggaagctatgaggtttgggaaacgcagtcaccggaaggttatctgaagccagataaagcagtagctactttcaaagttgataaggacggtacaattaaagatttgacacctgataacggtaagattattaattatcctaatactgctaagattatttttacgaaaatgttggcttctgaaaaagaggaattgtctcctgccacgaaagagaagtctgcaacgttcagtttatggcgacttaaagaggagagtttgaaagaaactaatacagtaagtcaagcttatgatgagcagtattatgagccagttatggagaacaatagtgttcggacagtaacctcagatagtagtggaaatgttttatttgataagctttctccgggtttttacgctattaaggaagaaaaggcgcctgatggctacgttaagcagcaaggaattgtgcgtatcttccaagtagatagttctggtaaggtaattaagtatcagtattttaaagataagtcaatagctggtaagctaacagaaattacagatttagaaaccgaacagctaaaacaatttaatgagattattaataaaaagtttgttttccctatgacaggtgggcagggtattgcactattaatgataattggtggtactatgatgggtattgcttattttggtcatcgtagaaaacaaagattaaatgattga

SEQ ID NO: 261 - DNA, 4104 bp, Streptococcus pyogenes; identical to SEQ ID NO: 260

SEQ ID NO: 262 - DNA, 4104 bp, Streptococcus pyogenes; identical to SEQ ID NO: 260

SEQ ID NO: 263 - DNA, 2271 bp, Streptococcus pyogenes
atgaataacaaaaaattgcaaaagaagcaagatgctcctcgggtatcaaacagaaagccaaaacaattaactgtcactttagtgggagtatttttaatgtttttgaccttggtaagttccatgagaggtgctcaaagcatatttggagaggaaaagagaattgaagaagtcagtgttcctaaaataaaaagtccagatgatgcctacccttggtatggctatgattcatatgactctagtcatccttactatgaacgttttaaagtagcacatgatttaagggttaatttaaatggaagtaagagctaccaagtatattgctttaatatcaattctcattatccgaatagaaaaaatgctttttctaaacaatggtttaagagagttgatgggacaggtgatgtgttcacaaattatgctcagacacctaagattcgtggagaatcattgaataataaacttttaagtattatgtacaacgcttatcctaaaaatgctaatggctatatggataagatagaaccattaaatgctattttagtaactcaacaagctgtttggtactattctgacagttcttatggtaatataaaaacgttatgggcatctgagcttaaagacggaaaaatagattttgaacaagtaaaattaatgcgtgaagcttactcaaaactaattagtgatgatttagaagaaacatctaaaaataagctacctcaaggatctaaactgaatatttttgttccgcaagataaatctgttcaaaatttattaagtgcagagtacgtgcctgaatcccctccggcaccaggtcagtctccagaaccgccagtgcaaacaaaaaaaacatcagtcattatcagaaaatatgcggaaggtgactactctaaacttctagagggagcaactttgcgtttaacaggggaagatatcctagattttcaagaaaaagtcttccaaagtaatggaacaggagaaaagattgaattatcaaatgggacttataccttaacagaaacatcatctccagatggatataaaattgcggagccgattaagtttagagtagtgaataaaaaagtatttatcgtccaaaaagatggttctcaagtggaaaatccaaacaaagaagtagcagagccatactcagtggaagcgtacagcgatatgcaagatagtaactatattaatccagaaacgttcactccttatgggaaattttattacgctaaaaataaggataaaagttcacaagttgtctactgttttaatgctgatttacactctccacctgaatcagaggatggaggaggaactatagatcctgatattagtacgatgaaagaagtcaagtacacacatacggcaggtagtgatttgtttaaatacgcgctaagaccgagagatacaaatccagaagacttcttaaagcacattaaaaaagtaattgaaaaaggctacaataaaaaaggtgatagctataatggattaacagaaacacagtttcgcgcggctactcagcttgctatctattactttacagacagcactgacttaaaaaccttaaaaacttataacaatgggaaaggttaccatggatttgaatctatggatgaaaaaaccctagctgtaacaaaagaattaattaattacgctcaagataatagtgcccctcaactaacaaatcttgatttcttcgtacctaataatagcaaataccaatctcttattgggacagaataccatccagatgatttggttgacgtgattcgtatggaagataaaaagcaagaagttattccagtaactcacagtttgacagtgaaaaaaacagtagtcggtgagttgggagataaaactaaaggcttccaatttgaacttgagttgaaagataaaactggacagcctattgttaacactctaaaaactaataatcaagatttagtagctaaagatgggaaatattcatttaatctaaagcatggtgacaccataagaatagaaggattaccgacgggatattcttatactctgaaagagactgaagctaaggattatatagtaaccgttgataacaaagttagtcaagaagctcaatcagcaagtgagaatgtcacagcagacaaagaagtcacttttgaaaaccgtaaagatcttgtcccaccaactggttttactactgatggtggaacctatctgtggttattattgcttgtcccatttggtttgttagtgtggttctttggtcgtaaaggactaaaaaatgactaa

SEQ ID NO: 264 - DNA, 3111 bp, Streptococcus pyogenes
atgtacagtagattgaagagagagttagttatagtgataaacagaaaaaagaaatataaactaattagactgatggttaccgtaggccttattttttcgcagttagttttacctataaggcgactaggcttgcagatgatttctacacagaccaaagtgatcccccaagagattgttactcaaacagaaactcagggaactcaggtagttgcaacgaaacaaaaattagagtcagaaaatagtagtctaaaggtagctcttaaaagagaatcaggttttgaacataatgccacgattgatgcttctttagatacagaatcccaaggagataatagtcaacgtagcgtaactcaagctatcgttactatggcattagaattgagaaagcaagggctatcaatcgttgataccaaaatagttagaatccagtcttctaccaatcaaagaaacgatatcacaacaaccttaacttttaagaatggcttatctttagaaggtgcttcaaccgaagcaaacgacccgaatgtaagagtaggtatcgtaaatcctaatgatactgttcaaacaataacacctactattaaacaagacgcagatggtaaagttaagaaccttgtttttactggcaggcttgggaaacaggtcataatagttagcacaactcgtctaaaagaagaacaaacgatctcattagattcttatggagaattagttattgatggagctgttgggctcagccagaaagataggcccccttacagcaagccaatcacagtaaatatcttaaaaccaaagttatcctcaattgaaagttcgcttgattctaaagattttgaaatcgttaaaacgattgataatctctacacttgggacgatcagttttatctcttggattttatttccaaacaatacgaagttttaaaaacggactaccaatcagctaaggatagcaccccacaaacacgagacattttatttggagaatacactgttgagcctttagtcatgaataaaggccataacaatacaattaacatttacattcgttcaacaaggccacttgggttaaaaccaataggagcagccccagcactaattcagccacgttcttttcgctccttaactcccagatcaactagaatgaagaggtctgccccagttgagaaattcgaaggtgaattggagcaccataagcggattgactatttaggagataatcaaaataatcctgataccaccatcgacgataaagaagacgaacatgacacctctgatctctatcgtctctatctggatatgacaggaaagaaaaatcccctagatattcttgttgttgtggataagtcagggagtatgcaggaagggataggatcggttcaaagatatagatactatgctcagagatgggatgattactatagtcaatgggtttatcatggaacttttgactattctagctatcaaggtgagtcttttaacagaggtcaaattcattatagatatagaggtattgtatctgtatctgatggtattagaagagatgatgcggtaaaaaattctcttctaggcgtaaatggattgttgcagagatttgttaatattaatccagaaaataaattatcagttattggctttcaaggcagtgctgattaccatgcaggaaaatggtatcctgatcaatccccacgtggtggattttatcagcctaatttaaataatagtagagatgctgaacttcttaagggatggtctactaattctttattagatcctaatactttgacagcattgcataacaatggtaccaattatcatgctgctttattaaaagctaaagagattctaaatgaagtaaaagatgatggccgaagaaaaataatgatattcataagtgatggagttcccacgttttattttggagaagatggctatcgctcaggaaatggtagttcaaatgatcgtaataatgttacacgatcacaagaaggaagcaaacttgcaatagatgagtttaaggctagatatcctaacttgtcaatatattcattgggcgtttctaaagatattaatagtgatacggcaagttccagtcctgttgtcctaaaatacttgtcaggtgaggagcattactacggtattacggacacagcagaattagaaaaaactttgaataaaattgttgaggatagtaagttatctcagctaggaatttcggatagtttaagtcagtatgttgactactatgataaacaacctgatgtacttgttactagaaaatcgaaggttaatgatgaaacagagattttataccaaaaagaccaagttcaagaagctggtaaagatatcattgataaagttgtatttaccccgaaaactactagtcaaccaaaaggtaaagttactttaacctttaagtctgattataaggttgatgatgaatatacctatacgctttcttttaatgtgaaagcttcagatgaagcctatgagaagtataaggataacgaaggaagatatagcgaaatgggagattccgatactgattatggaaccaaccaaactagttctggaaaaggtggtttgccttctaattcagatgcttcggttaattatatggcagatggtcgtgaacagaaattaccttataagcacccagtgattcaggtcaaaacagtaccaatcacgtttaccaaagtagatgctgacaacaaccagaaaaaacttgcaggtgttgagtttgaactccgtaaagaggacaagaagatcgtctgggaaaagggaacaacaggttcaaatggccaactcaactttaagtaccttcaaaaaggcaaaacctattatctgtatgagacgaaggcaaaacttggatacactcttccagaaaatccatgggaagttgccgttgctaacaacggtgatataaaagtaaaacacccgattgaaggtgaattgaagtcaaaagatggctcttacatgattaaaaattataagatttatcagttgccatcgtctgggggaagaggaagtcaaattttcattatagttggtagcatgacagcaactgtagcattattattttatagacgccaacacaggaaaaagcaatattaa

SEQ ID NO: 265 - DNA, 3111 bp, Streptococcus pyogenes; identical to SEQ ID NO: 264

SEQ ID NO: 266 - DNA, 2295 bp, Streptococcus pyogenes
  misc_feature (1)...(2295): n = A,T,C or G
atgaataacaaaaaattgcaaaagaagcaagatgctcctcgggtatcaaacagaaagccaaaacaattaactgtcactttagtgggagtatttttaatgtttttgaccttggtaagttccatgagaggtgctcaaagcatatttggagaggaaaagagaattgaagaagtcagtgttcctaaaataaaaagtccagatgatgcctacccttggtatggctatgattcatatgactctagtcatccttactatgaacgttttaaagtagcacatgatttaaaagttaatttaaacggaagtaagagctaccaagtatattgtttcaacatcagttctcactacccagagaaaaaaaattattctactaaaaactggtttcagagagttgatgggacaggtgatgtattcacaagttatgctaaaacccctagagttagtggtgaagaattaaataagaaacttctaagtgttatgtataatgcttatcctaaaaatgctaatggttatatggataacatagaaccattaaatgcgattttagtaactcaatatgcggtttggtattactcagatagttcatcttatacagttaatacactttgggactctgaagttaaagagggtaagataaaatctgaacaggtgatgttaatgcgtgaagctttatcaaagttaattgatcctaaattggaagaaatagcagaaaagaagttatctcacaactctaaactgaatatttttgttccgcaagataaatctgttcaaaatttattaagtgcagagtacgtgcctgaatcccctccggcaccaggtcagccaccactaccgccagtgcaaacaaaaaaaacaacagtaattatcaggaagtatgctaaaggtgattattctaagcttttggaaggcgcaacatttagtttaacgtcagaagacgtccctaattttgaaccgataatatttcaaagtaatagtataggaaaaacagttgaactgttagatggaacttatactttaacagaaacagctcctccgaatggatatgaaattgcaaaacctaccaaatttagggtgaaacaaggtgacgtatctatcgttcaagaggatggcactgaaattcaaaatcctaataaagaagtggcagagccntactcagtagagggttatgacgatagaagtaatgatggtcaaatttcctcaggtagaccttatggtaagttttattatgctaaaaataggaatgctacttcacaggtagtttattgttttaatgccaacctaaagtcacctccagaatcatatgataatggtcaagagatagctccggatttaggcacgatgcaggctgttaaatattcgcatatagctggtacagaattatggaattatgctaaaaatccaaaagaaagtgatcctactactttcttaaaacgcattaagaaagttattgaaagaggttatgggtatcaaaataatcagacaccagaaggtttgactgatgtgcaattccgagcagctactcaactagctatttactattttacagatagtgctaatttagagactttaaagtcttatggtaaaccagaaggtgaggcagaaaacttagagaagtatggctaccatggcttccaatttttggaatcaagagctttagaagtgactcgagaattgatcgcgtatgctgaaaatgatgaggatgctaagattgaaagtctagacttctttattccaaataatagtagatatcagtctctggtagggacgcaatatcatcccgatgatttgactaatattattcgtatagaagacaaaaaactggtagctccagaggtgactcatagtttaactattaagaaaacagttgtaggtgagcttggtgataaggaaaaagaatttgaattctctattcgcttaacggatcgtaaaggtaaacctgtgactagtccaataatgagtaacaaggaaactgtcacgtgggataatggtactgctaaattcaaactaaaagatggagaatcaataacatttactgggctacctacggggtactattatgaaattactgaaactggtgctactgattatgagataagtgttaatggaaaaaatgcaccagatggaaaagcgacgaaagcctcagttaaggaagatgagactgtagcttttgaaaaccgaaaagatcttgtcccaccaactggtttgacaacagatggggctatctatctttggttgttattacttgttccacttgggttatgggtttggctaattggtcgtaagggactaaaaaatgactaa

SEQ ID NO: 267 - DNA, 2244 bp, Streptococcus pyogenes
atgaataacaaaaaattgcaaaagaagcaagatgctcctcgggtatcaaacagaaagccaaaacaattaactgtcactttagtgggagtatttttaatgctcctagtattgataggatttgaaggaaaagttcgagcagctcacgaattggttgaggtaccagtacctatttttcacaatccagatccacagtcagactatcagtggtatggctatgaagcctatacaggggggtatccgaagtatgatttattcaagacatactatcatgatctgagagtgaatttgcatgggagtaaaagttatcaagtatattgctttaacgttcacaaacactatcctcgttcctcccagagttttgatcggaagtggtataaaaaattagatggaactgctgagaattttgattctcttgctatggaaccaagagttcgtaaagaggagttaaccaaaaaactccgagctgttatgtataatgcctatcctaatgatgctaatggcattatgaaagatttagagcctttaaatgctattaaagtcactcaagaggctgtatggtactattctgattcagctcaaattaatccggatgaaagttttaaaacagaagctcaaagtaatggtattaatgaccagcagttaggcttaatgcgaaaagctttaaaagaactaattgatccaaacttagggtcaaaatattcgaataaaactccatcaggttatcggttaaatgtatttgaatctcatgataagactttccaaaatcttttgagtgctgagtatgttccggatactcccccaaaaccaggagaagagcctccggctaaaactgaaaaaacatcagtcattatcagaaaatatgcggaaggtgactactctaaacttctagagggagcaactttgcgtttaacaggggaagatatcccagattttcaagaaaaagtcttccaaagtaatggaacaggagaaaagattgaattatcaaatgggacttataccttaacagaaacatcatctccagatggatataaaattgcggagccgattaagtttagagtagtgaataaaaaagtatttatcgtccaaaaagatggttctcaagtggaaaatccaaacaaagaagtaggttctccatatactatagaggcatacaatgattttgatgaatttggcttactgtcaacacaaaattatgcgaaattttattatggaaaaaactatgatggcagttcacaaattgtttattgcttcaatgccaacttgaaatccccacctgactcggaagatcatggtgctacaataaatcctgactttacgactggtgatattaggtatagtcatattgctggttcagatttgataaaatacgctaatacagctagggatgaagatcctcaattatttttaaaacacgtaaaaaaagtaattgaaaatgggtatcataaaaaaggtcaagctattccatataacggtctgactgaggcacagtttcgcgcggctactcaactggcaatttattattttacagatagtgttgacttaactaaggatagattgaaagacttccatggatttggagatatgaatgatcaaactttgggtgtagctaaaaaaattgtagaatacgctttgagtgatgaagattcaaaactaacaaatcttgatttcttcgtacctaataatagcaaataccaatctcttattgggacagaataccatccagatgatttggttgacgtgattcgtatggaagataaaaagcaagaagttattccagtaactcatagtttgacggtgaaaaaaacagtagtcggtgagttgggagataagactaaaggcttccaatttgaacttgagttgaaagataaaactggacagcctattgtcgacgctctaaaaactaataatcaagatttagtagctaaagatgggaaatattcatttaatctaaagcatggtgacaccataagaatagaaggattaccgacgggatattcttatactctgaaagagactgaagctaaggattatatagtaaccgttgataacaaagttagtcaagaagctcaatcagcaagtgagaatgtcacagcagacaaagaagtcacttttgaaaaccgaaaagatcttgtcccaccaactggtttgacaacagatggggctatctatctttggttgttatttcttgttccatttgggttattggtttggctatttggtcgtaagggactaaaaaatgactaa

SEQ ID NO: 268 - DNA, 2271 bp, Streptococcus pyogenes
atgaataacaaaaaattgcaaaagaagcaagatgctcctcgggtatcaaacagaaagccaaaacaattaactgtcactttagtgggagtatttttaatgtttttgaccttggtaagttccatgagaggtgctcaaagcatatttggagaggaaaagagaattgaagaagtcagtgttcctaaaataaaaagtccagatgatgcctacccttggtatggctatgattcatatgactctagtcatccttactatgaacgttttaaagtagcacatgatttaagggttaatttaaatggaagtaagagctaccaagtatattgctttaatatcaattctcattatccgaatagaaaaaatgctttttctaaacaatggtttaagagagttgatgggacaggtgatgtgttcacaaattatgctcagacacctaagattcgtggagaatcattgaataataaacttttaagtattatgtacaacgcttatcctaaaaatgctaatggctatatggataagatagaaccattaaatgctattttagtaactcaacaagctgtttggtactattctgacagttcttatggtaatataaaaacgttatgggcatctgagcttaaagacggaaaaatagattttgaacaagtaaaattaatgcgtgaagcttactcaaaactaattagtgatgatttagaagaaacatctaaaaataagctacctcaaggatctaaactgaatatttttgttccgcaagataaatctgttcaaaatttattaagtgcagagtacgtgcctgaatcccctccggcaccaggtcagtctccagaaccgccagtgcaaacaaaaaaaacatcagtcattatcagaaaatatgcggaaggtgactactctaaacttctagagggagcaactttgcgtttaacaggggaagatatcctagattttcaagaaaaagtcttccaaagtaatggaacaggagaaaagattgaattatcaaatgggacttataccttaacagaaacatcatctccagatggatataaaattgcggagccgattaagtttagagtagtgaataaaaaagtatttatcgtccaaaaagatggttctcaagtggaaaatccaaacaaagaagtagcagagccatactcagtggaagcgtacagcgatatgcaagatagtaactatattaatccagaaacgttcactccttatgggaaattttattacgctaaaaataaggataaaagttcacaagttgtctactgttttaatgctgatttacactctccacctgaatcagaggatgggggaggaactatagatcctgatattagtacgatgaaagaagtcaagtacacacatacggcaggtagtgatttgtttaaatacgcgctaagaccgagagatacaaatccagaagacttcttaaagcacattaaaaaagtaattgaaaaaggctacaataaaaaaggtgatagctataatggattaacagaaacacagtttcgcgcggctactcagcttgctatctattactttacagacagcactgacttaaaaaccttaaaaacttataacaatgggaaaggttaccatggatttgaatctatggatgaaaaaaccctagctgtaacaaaagaattaattaattacgctcaagataatagtgcccctcaactaacaaatcttgatttcttcgtacctaataatagcaaataccaatctcttattgggacagaataccatccagatgatttggttgacgtgattcgtatggaagataaaaagcaagaagttattccagtaactcacagtttgacagtgaaaaaaacagtagtcggtgagttgggagataaaactaaaggcttccaatttgaacttgagttgaaagataaaactggacagcctattgttaacactctaaaaactaataatcaagatttagtagctaaagatgggaaatattcatttaatctaaagcatggtgacaccataagaatagaaggattaccgacgggatattcttatactctgaaagagactgaagctaaggattatatagtaaccgttgataacaaagttagtcaagaagctcaatcagcaagtgagaatgtcacagcagacaaagaagtcacttttgaaaaccgtaaagatcttgtcccaccaactggttttattactgatggtggaacctatctgtggttattattgcttgtcccatttggtttgttagtgtggttctttggtcgtaaaggactaaaaaatgactaa

SEQ ID NO: 269 - DNA, 2271 bp, Streptococcus pyogenes; identical to SEQ ID NO: 268

SEQ ID NO: 270 - DNA, 2271 bp, Streptococcus pyogenes; identical to SEQ ID NO: 268

SEQ ID NO: 271 - DNA, 2265 bp, Streptococcus pyogenes
atgaataacaaaaaattgcaaaagaagcaagatgctcctcgggtatcaaacagaaagccaaaacaattaactgtcactttagtgggagtatttttaatgctcttagtattgataggatttgaaggaaaagttcgagcagctcacgaattggttgaggtaccagtacctatttttcacaatccagatccacagtcagactatcagtggtatggctatgaagcctatacaggggggtatccgaagtatgatttattcaagacatactatcatgatctgagagtgaatttgcatgggagtaaaagttatcaagtatattgctttaacgttcacaaacactatcctcgttcctcccagagttttgatcggaagtggtataaaaaattagatggaactgctgagaattttgattctcttgctatggaaccaagagttcgtaaagaggagttaaccaaaaaactccgagctgttatgtataatgcctatcctaatgatgctaatggcattatgaaagatttagagcctttaaatgctattaaagtcactcaagaagctgtatggtactattcggacaattctcctattaacccagatgaaagttttaaatctgaagctctggctaataaaattagtgctacacaaatatctttaatgagagaggctttgaagcaacttattgctcctgatttagatgagaagcaatctaggagagttcctgatggatatcagttgagtatttttgaatctgagaataaggattatcaaaatcttttggctgcagaagaggttcctattcaacctccaaaaccgggggataagccaccactaccgccagtgcaaacaaaaaaaacatcagtcattatcagaaaatatgcggaaggtgactactctaaacttctagagggagcaaccttaaagcttgctcaaattgaaggaagtggttttcaggagaaaatttttgatagtaacaaatctggagagaaagtagagctacctaatgggacttacgttttaagtgagctaaaacctcctcaaggatatagatttgccacacccattacttttaaagttgcagctgggaaagttttaataaaaaataaagaaggtcaatttgtagagaaccaaaataaggaaatcgcagagccatattctgtaacagctttcaatgactttgaagagattggttatttatctgattttaataactatggtaaattttactatgcaaaaaatactaatggaactagtcaagttgtctactgtttcaatgctgatttacactcaccacctgactcatatgatagtggtgagactataaatccagatactagtacgatgaaagaagtcaagtacacacatacggcaggtggtgatttgtttaaatacgcgctaagaccgagagatacaaatccagaagacttcctaaagcatattaaaaaagtaattgaaaaaggctacaagaaaaaaggtaatagctataatggattaacagaaacacagtttcgcgcggctactcagcttgctatctattactttacagacagcactgacttaaaaaccttaaaaacttataacaatgggaaaggttaccatggatttgaatctgtggatgaaaaaaccctagctgtcacaaaagaattaattacttatgctcaaaatggcagtgcccctcaactaacaaatcttgatttcttcgtacctaataatagcaaataccaatctcttattgggacagaataccatccagatgatttggttgacgtgattcgtatggaagataaaaagcaagaagttattccagtaactcacagtttgacagtgaaaaaaacagtagtcggtgagttgggagataaaactaaaggcttccaatttgaacttgagttgaaagataaaactggacagcctattgttaacactctaaaaactaataatcaagatttagtagctaaagatgggaaatattcatttaatctaaagcatggtgacaccataagaatagaaggattaccgacgggatattcttatactctgaaagagactgaagctaaggattatatagtaaccgttgataacaaagttagtcaagaagctcaatcagcaagtgagaatgtcacagcagacaaagaagtcacttttgaaaaccgaaaagatcttgtcccaccaactggtttgacaacagatggggctatctatctttggttgttattacttgttccacttgggttatgggtttggctaattggtcgtaagggactaaaaaatgactaa

SEQ ID NO: 272 - DNA, 2265 bp, Streptococcus pyogenes
atgaataacaaaaaattgcaaaagaagcaagatgctcctcgggtatcaaacagaaagccaaaacaattaactgtcactttagtgggagtatttttaatgctcttagtattgataggatttgaaggaaaagttcgagcagctcacgaattggttgaggtaccagtacctatttttcacaatccagatccacagtcagactatcagtggtatggctatgaagcctatacaggggggtatccgaagtatgatttattcaagacatactatcatgatctgagagtgaatttgcatgggagtaaaagttatcaagtatattgctttaacgttcacaaacactatcctcgttcctcccagagttttgatcggaagtggtataaaaaattagatggaactgctgagaattttgattctcttgctatggaaccaagagttcgtaaagaggagttaaccaaaaaactccgagctgttatgtataatgcctatcctaatgatgctaatggcattatgaaagatttagagcctttaaatgctattaaagtcactcaagaagctgtatggtactattcggacaattctcctattaacccagatgaaagttttaaatctgaagctctggctaataaaattagtgctacacaaatatctttaatgagagaggctttgaagcaacttattgctcctgatttagatgagaagcaatctaggagagttcctgatggatatcagttgagtatttttgaatctgagaataaggattatcaaaatcttttggctgcagaagaggttcctattcaacctccaaaaccgggggataagccaccactaccgccagtgcaaacaaaaaaaacatcagtcattatcagaaaatatgcggaaggtgactactctaaacttctagagggagcaaccttaaagcttgctcaaattgaaggaagtggttttcaggagaaaatttttgatagtaacaaatctggagagaaagtagagctacctaatgggacttacgttttaagtgagctaaaacctcctcaaggatatagatttgccacacccattacttttaaagttgcagctgggaaagttttaataaaaaataaagaaggtcaatttgtagagaaccaaaataaggaaatcgcagagccatattctgtaacagctttcaatgactttgaagagattggttatttatctgattttaataactatggtaaattttactatgcaaaaaatactaatggaactagtcaagttgtctactgtttcaatgctgatttacactcaccacctgactcatatgatagtggtgagactataaatccagatactagtacgatgaaagaagtcaagtacacacatacggcaggtggtgatttgtttaaatacgcgctaagaccgagagatacaaatccagaagacttcctaaagcatattaaaaaagtaattgaaaaaggctacaagaaaaaaggtgatagctataatggattaacagaaacacagtttcgcgcggctactcagcttgctatctattactttacagacagcactgacttaaaaaccttaaaaacttataacaatgggaaaggttaccatggatttgaatctgtggatgaaaaaaccctagctgtcacaaaagaattaattacttatgctcaaaatggcagtgcccctcaactaacaaatcttgatttcttcgtacctaataatagcaaataccaatctcttattgggacagaataccatccagatgatttggttgacgtgattcgtatggaagataaaaagcaagaagttattccagtaactcacagtttgacagtgaaaaaaacagtagtcggtgagttgggagataaaactaaaggcttccaatttgaacttgagttgaaagataaaactggacagcctattgttaacactctaaaaactaataatcaagatttagtagctaaagatgggaaatattcatttaatctaaagcatggtgacaccataagaatagaaggattaccgacgggatattcttatactctgaaagagactgaagctaaggattatatagtaaccgttgataacaaagttagtcaagaagctcaatcagcaagtgagaatgtcacagcagacaaagaagtcacttttgaaaaccgaaaagatcttgtcccaccaactggtttgacaacagatggggctatctatctttggttgttattacttgttccacttgggttatgggtttggctaattggtcgtaagggactaaaaaatgactaa

SEQ ID NO: 273 - DNA, 2265 bp, Streptococcus pyogenes; identical to SEQ ID NO: 271

SEQ ID NO: 274 - DNA, 3129 bp, Streptococcus pyogenes
atgtacagtagattgaagagagagttagttatagtgataaacagaaaaaagaaatataaactaattagactgatggttaccgtaggccttattttttcgcagttagttttacctataaggcgactaggcttgcagatgatttctacacagaccaaagtgatcccccaagagattgttactcaaacagaaactcagggaactcaggtagttgcaacgaaacaaaaattagagtcagaaaatagtagtctaaaggtagctcttaaaagagaatcaggttttgaacataatgccacgattgatgcttctttagatacagaatcccaaggagataatagtcaacgtagcgtaactcaagctatcgttactatggcattagaattgagaaagcaagggctatcaatcgttgataccaaaatagttagaatccagtcttctaccaatcaaagaaacgatatcacaacaaccttaacttttaagaatggcttatctttagaaggtgcttcaaccgaagcaaacgacccgaatgtaagagtaggtatcgtaaatcctaatgatactgttcaaacaataacacctactattaaacaagaagcagatggtaaagttaagaaccttgtttttactggcaggcttgggaaacaggtcataatagttagcacaactcgtctaaaagaagaacaaacgatctcattagattcttatggagaattagttattgatggagctgttgggctcagccagaaagataggcccccttacagcaagccaatcacagtaaatatcttaaaaccaaggttatcctcaattgaaagttcgcttgattctaaagattttgaaatcgttaaaacgattgataatctctacacttgggacgatcagttttatctcttggattttatttccaaacaatacgaagttttaaaaacggactaccaatcagctaaggatagcacctcacaaacacgagatattttatttggagaatacactgttgagcctttagtcattaataaaggccataacaatacaattaacatttacattcgttcaacaaggccacttgggttaaaaccaataggagcagccccagcactaattcagccacgttcttttcgctccttaactcccagatcaactagaatgaagaggtctgccccagttgagaaattcgaaggtgaattggagcaccataagcggattgactatttaggagataatcaaaataatcctgataccaccatcgacgataaagaagacgaacatgacacctctgatatctatcgtctctatctggatatgacaggaaaaaagcaaccactggatatcctagtagttgtagataggtctgggagtatgcaggatgggataggatcgatagagaaatataaatattggaagtataaatatgatgaatattatcatatttggagaaatgctggtacgatatattttgataattatcttggtcctagatatcagcctgatacttatacatattatgattatcaatcgaaagaatcagtcccttttggtattaagcgagatcaggcagtaaaagatgccttaataggatcaacaggacttttacagaaatttttagatattaaccctcaaaatcaacttgctgttgttggatttcagggaagtgtcgcttacaggtattatgatgaaaagcctgagagaactccttggaatacgattatgtatcagccgagtaaatcaactagcaaagatgctgatgttttaaaagattgggaaacctcttcgaacttgagtcgtgatagtttatcctatgaggataggaacgggacgaactatcatgcagcactattaaaggcagatgaaaagcttcaaaaagtagctaataatggtcatcgaaaaataatggtttttattagtgatggtgttccaacattttattttggggcagataattatcgttcaggaaatggtactgtaagtgatagtaatattattaattctcaaaaaggcagtaagcttgcgatagatgaattcaaaaataaatacccaaacttgtccatttattccttaggtgtttctaaggatattaatagtgacacgtcaagctcaagtccagtggttctgaaatatttatcgggggatgactactactctggtattacagatacagagcaattagaaaaaactgccaataaaattgttgaagatagtaagatttctaacttaactatttctgatacgttgagccagtatgttaatgtatacgatgagcaaccagacattcttgtgacacgaaaatcaaagaagacaggggcaatagaaatcgtatataaagacaatagggtaacagaaatggggagagatattattgagggagtgagttttacttctgaaaaatcaggtaatagcactggaaaagtcaccttaaaatttaaaccagattacaaaatagatgatgagtacacctacaccttatcttttaatgtgaaagcttcagataaagcctatgagaagtataaggacgaaaaaggcaagtatacagttgaaggtgatgtagatacagactataatggaaatcaaactagttctggaaaaggtggtttgccttctaattcagatgcttcggttaattatatggcagatggtcgtgaacagaaattaccttataagcacccagtgattcaggtcaaaacagtaccaatcatgtttactaaagtagatgctgacaacagtcagaaaaaacttgaaggtgttgcgtttgaactccgtaaagcagacaagaaaacagtctgggaaaaaggaataacaaattcaactggccaactagagtttaactaccttcaaaaaggcaaaacctattatctttatgagactaaggccagaatagggtatactctcccagaaaatccatgggaggtcaaggttgacagtaagggtaaaattacagtgaagcaccctatcgagggagatctgagttctaaaggtgagacatatactataaagaatcacaaaatttatcagttaccatcatctggtggaagaggcagtcagcttttcattattttgggaagcatgctgatgacaactaccatactgctttatagacgttacaactatagaaagaagatggacaagactagcttataa

SEQ ID NO: 275 - DNA, 2244 bp, Streptococcus pyogenes
atgaataacaaaaaattgcaaaagaagcaagatgctcctcgggtatcaaacagaaagccaaaacaattaactgtcactttagtgggagtatttttaatgctcttagtattgataggatttgaaggaaaagttcgagcagctcacgaattggttgaggtaccagtacctatttttcacaatccagatccacagtcagactatcagtggtatggctatgaagcctatacaggggggtatccgaagtatgatttattcaagacatactatcatgatctgagagtgaatttgcatgggagtaaaagttatcaagtatattgctttaacgttcacaaacactatccccgttcctcccagagttttgatcggaagtggtataaaaaattagatggaactgctgagaattttgattctcttgctatggaaccaagagttcgtaaagaggagttaaccaaaaaactccgagctgttatgtataatgcctatcctaatgatgctaatggcattatgaaagatttagagcctttaaatgctattaaagtcactcaagaggctgtatggtactattctgattcagctcaaattaatccggatgaaagttttaaaacagaagctcaaagtaatggtattaatgaccagcagttaggcttaatgcgaaaagctttaaaagaactaattgatccaaacttagggtcaaaatattcgaataaaactccatcaggttatcggttaaatgtatttgaatctcatgataagactttccaaaatcttttgagtgctgagtatgttccggatactcccccaaaaccaggagaagagcctccggctaaaactgaaaaaacatcagtcattatcagaaaatatgcggaaggtgactactctaaacttctagagggagcaactttgcgtttaacaggggaagatatcccagattttcaagaaaaagtcttccaaagtaatggaacaggagaaaagattgaattatcaaatgggacttataccttaacagaaacatcatctccagatggatataaaattgcggagccgattaagtttagagtagtgaataaaaaagtatttatcgtccaaaaagatggttctcaagtggaaaatccaaacaaagaagtaggttctccatatactatagaggcatacaatgattttgatgaatttggtttactgtcaacacaaaattatgcgaaattttattatggaaaaaactatgatggcagttcacaaattgtttattgcttcaatgccaacttgaaatccccacctgactcggaagatcatggtgctacaataaatcctgactttacgactggtgatattaggtatagtcatattgctggttcagatttgataaaatacgctaatacagctagggatgaagatcctcaattatttttaaaacacgtaaaaaaagtaattgaaaatgggtatcataaaaaaggtcaagctattccatataacggtctgactgaggcacagtttcgcgcggctactcaactggcaatttattattttacagatagtgttgacttaactaaggatagattgaaagacttccatggatttggagatatgaatgatcaaactttgggtgtagctaaaaaaattgtagaatacgctttgagtgatgaagattcaaaactaacaaatcttgatttcttcgtacctaataatagcaaataccaatctcttattgggacagaataccatccagatgatttggttgacgtgattcgtatggaagataaaaagcaagaagttattccagtaattcatagtttgacggtgaaaaaaacagtagtcggtgagttgggagataagactaaaggcttccaatttgaacttgagttgaaagataaaactggacagcctattgtcgacgctctaaaaactaataatcaagatttagtagctaaagatgggaaatattcatttaatctaaagcatggtgacaccataagaatagaaggattaccgacgggatattcttatactctgaaagagactgaagctaaggattatatagtaaccgttgataacaaagttagtcaagaagctcaatcagcaagtgagaatgtcacagcagacaaagaagtcacttttgaaaaccgtaaagatcttgtcccaccaactggttttactactgatggtggaacctatctgtggttattattgcttgtcccatttggtttgttagtgtggttctttggtcgtaaaggactaaaaaatgactaa

SEQ ID NO: 276 - DNA, 2244 bp, Streptococcus pyogenes; identical to SEQ ID NO: 275

SEQ ID NO: 277 - DNA, 2244 bp, Streptococcus pyogenes
atgaataacaaaaaattgcaaaagaagcaagatgctcctcgggtatcaaacagaaagccaaaacaattaactgtcactttagtgggagtatttttaatgctcttagtattgataggatttgaaggaaaagttcgagcagctcacgaattggttgaggtaccagtacctatttttcacaatccagatccacagtcagactatcagtggtatggctatgaagcctatacaggggggtatccgaagtatgatttattcaagacatactatcatgatctgagagtgaatttgcatgggagtaaaagttatcaagtatattgctttaacgttcacaaacactatccccgttcctcccagagttttgatcggaagtggtataaaaaattagatggaactgctgagaattttgattctcttgctatggaaccaagagttcgtaaagaggagttaaccaaaaaactcctagctgttatgtataatgcctatcctaatgatgctaatggcattatgaaagatttagagcctttaaatgctattaaagtcactcaagaggctgtatggtactattctgattcagctcaaattaatccggatgaaagttttaaaacagaagctcaaagtaatggtattaatgaccagcagttaggcttaatgcgaaaagctttaaaagaactaattgatccaaacttagggtcaaaatattcgaataaaactccatcaggttatcggttaaatgtatttgaatctcatgataagactttccaaaatcttttgagtgctgagtatgttccggatactcccccaaaaccaggagaagagcctccggctaaaactgaaaaaacatcagtcattatcagaaaatatgcggaaggtgactactctaaacttctagagggagcaactttgcgtttaacaggggaagatatcccagattttcaagaaaaagtcttccaaagtaatggaacaggagaaaagattgaattatcaaatgggacttataccttaacagaaacatcatctccagatggatataaaattgcggagccgattaagtttagagtagtgaataaaaaagtatttatcgtccaaaaagatggttctcaagtggaaaatccaaacaaagaagtaggttctccatatactatagaggcatacaatgattttgatgaatttggtttactgtcaacacaaaattatgcgaaattttattatggaaaaaactatgatggcagttcacaaattgtttattgcttcaatgccaacttgaaatccccacctgactcggaagatcatggtgctacaataaatcctgactttacgactggtgatattaggtatagtcatattgctggttcagatttgataaaatacgctaatacagctagggatgaagatcctcaattatttttaaaacacgtaaaaaaagtaattgaaaatgggtatcataaaaaaggtcaagctattccatataacggtctgactgaggcacagtttcgcgcggctactcaactggcaatttattattttacagatagtgttgacttaactaaggatagattgaaagacttccatggatttggagatatgaatgatcaaactttgggtgtagctaaaaaaattgtagaatacgctttgagtgatgaagattcaaaactaacaaatcttgatttcttcgtacctaataatagcaaataccaatctcttattgggacagaataccatccagatgatttggttgacgtgattcgtatggaagataaaaagcaagaagttattccagtaattcatagtttgacggtgaaaaaaacagtagtcggtgagttgggagataagactaaaggcttccaatttgaacttgagttgaaagataaaactggacagcctattgtcgacgctctaaaaactaataatcaagatttagtagctaaagatgggaaatattcatttaatctaaagcatggtgacaccataagaatagaaggattaccgacgggatattcttatactctgaaagagactgaagctaaggattatatagtaaccgttgataacaaagttagtcaagaagctcaatcagcaagtgagaatgtcacagcagacaaagaagtcacttttgaaaaccgtaaagatcttgtcccaccaactggttttactactgatggtggaacctatctgtggttattattgcttgtcccatttggtttgttagtgtggttctttggtcgtaaaggactaaaaaatgactaa

SEQ ID NO: 278 - DNA, 2244 bp, Streptococcus pyogenes; identical to SEQ ID NO: 275

SEQ ID NO: 279 - DNA, 2244 bp, Streptococcus pyogenes
atgaataacaaaaaattgcaaaagaagcaagatgctcctcgggtatcaaacagaaagccaaaacaattaactgtcactttagtgggagtatttttaatgctcttagtattgataggatttgaaggaaaagttcgagcagctcacgaattggttgaggtaccagtacctatttttcacaatccagatccacagtcagactatcagtggtatggctatgaagcctatacaggggggtatccgaagtatgatttattcaagacatactatcatgatctgagagtgaatttgcatgggagtaaaagttatcaagtatattgctttaacgttcacaaacactatccccgttcctcccagagttttgatcggaagtggtataaaaaattagatggaactgctgagaattttgattctcttgctctggaaccaagagttcgtaaagaggagttaaccaaaaaactcctagctgttatgtataatgcctatcctaatgatgctaatggcattatgaaagatttagagcctttaaatgctattaaagtcactcaagaggctgtatggtactattctgattcagctcaaattaatccggatgaaagttttaaaacagaagctcaaagtaatggtattaatgaccagcagttaggcttaatgcgaaaagctttaaaagaactaattgatccaaacttagggtcaaaatattcgaataaaactccatcaggttatcggttaaatgtatttgaatctcatgataagactttccaaaatcttttgagtgctgagtatgttccggatactcccccaaaaccaggagaagagcctccggctaaaactgaaaaaacatcagtcattatcagaaaatatgcggaaggtgactactctaaacttctagagggagcaactttgcgtttaacaggggaagatatcccagattttcaagaaaaagtcttccaaagtaatggaacaggagaaaagattgaattatcaaatgggacttataccttaacagaaacatcatctccagatggatataaaattgcggagccgattaagtttagagtagtgaataaaaaagtatttatcgtccaaaaagatggttctcaagtggaaaatccaaacaaagaagtaggttctccatatactatagaggcatacaatgattttgatgaatttggtttactgtcaacacaaaattatgcgaaattttattatggaaaaaactatgatggcagttcacaaattgtttattgcttcaatgccaacttgaaatccccacctgactcggaagatcatggtgctacaataaatcctgactttacgactggtgatattaggtatagtcatattgctggttcagatttgataaaatacgctaatacagctagggatgaagatcctcaattatttttaaaacacgtaaaaaaagtaattgaaaatgggtatcataaaaaaggtcaagctattccatataacggtctgactgaggcacagtttcgcgcggctactcaactggcaatttattattttacagatagtgttgacttaactaaggatagattgaaagacttccatggatttggagatatgaatgatcaaactttgggtgtagctaaaaaaattgtagaatacgctttgagtgatgaagattcaaaactaacaaatcttgatttcttcgtacctaataatagcaaataccaatctcttattgggacagaataccatccagatgatttggttgacgtgattcgtatggaagataaaaagcaagaagttattccagtaattcatagtttgacggtgaaaaaaacagtagtcggtgagttgggagataagactaaaggcttccaatttgaacttgagttgaaagataaaactggacagcctattgtcgacgctctaaaaactaataatcaagatttagtagctaaagatgggaaatattcatttaatctaaagcatggtgacaccataagaatagaaggattaccgacgggatattcttatactctgaaagagactgaagctaaggattatatagtaaccgttgataacaaagttagtcaagaagctcaatcagcaagtgagaatgtcacagcagacaaagaagtcacttttgaaaaccgtaaagatcttgtcccaccaactggttttactactgatggtggaacctatctgtggttattattgcttgtcccatttggtttgttagtgtggttctttggtcgtaaaggactaaaaaatgactaa

SEQ ID NO: 280 - DNA, 2244 bp, Streptococcus pyogenes; identical to SEQ ID NO: 275

SEQ ID NO: 281 - DNA, 2271 bp, Streptococcus pyogenes; identical to SEQ ID NO: 263

SEQ ID NO: 282 - DNA, 2265 bp, Streptococcus pyogenes; identical to SEQ ID NO: 272

SEQ ID NO: 283 - DNA, 2244 bp, Streptococcus pyogenes
atgaataacaaaaaattgcaaaagaagcaagatgctcctcgggtatcaaacagaaagccaaaacaattaactgtcactttagtgggagtatttttaatgctcttagtattgataggatttgaaggaaaagttcgagcagctcacgaattggttgaggtaccagtacctatttttcacaatccagatccacagtcagactatcagtggtatggctatgaagcctatacaagggggtatccgaagtatgatttattcaagacatactatcatgatctgagagtgaatttgcatgggagtaaaagttatcaagtatattgttttaacgttcacaaacactatcctcgttcctcccagagttttgatcggaagtggtataaaaaattagatggaactgctgagaattttgattctcttgctatggaaccaagagttcgtaaagaggagttaaccaaaaaactccgagctgttatgtataatgcctatcctaatgatgctaatggcattataaaagatttagagcctttaaatgctattaaagtcactcaagaggctgtatggtactattctgattcagctcaaattaatccggatgaaagttttaaaacagaagctcaaagtaatggtattaatgaccagcagttaggcttaatgcgaaaagctttaaaagaactaattgatccaaacttagggtcaaaatattcgaataaaactccatcaggttatcggttaaatgtatttgaatctcatgataagactttccaaaatcttttgagtgctgagtatgttccggatactcccccaaaaccaggagaagagcctccggctaaaactgaaaaaacatcagtcattatcagaaaatatgcggaaggtgactactctaaacttctagagggagcaactttgcgtttaacaggggaagatatcccagattttcaagaaaaagtcttccaaagtaatggaacaggagaaaagattgaattatcaaatgggacttataccttaacagaaacatcatctccagatggatataaaattgcggagccgattaagtttagagtagtgaataaaaaagtatttatcgtccaaaaagatggttctcaagtggaaaatccaaacaaagaagtaggttctccatatactatagaggcatacaatgattttgatgaatttggcttactgtcaacacaaaattatgcgaaattttattatggaaaaaactatgatggcagttcacaaattgtttattgcttcaatgccaacttgaaatccccacctgactcggaagatcatggtgctacaataaatcctgactttacgactggtgatattaggtatagtcatattgctggttcagatttgataaaatacgctaatacagctagggatgaagatcctcaattatttttaaaacacgtaaaaaaagtaattgaaaatgggtatcataaaaaaggtcaagctattccatataacggtctgactgaggcacagtttcgcgcggctactcaactggcaatttattattttacagatagtgttgacttaactaaggatagattgaaagacttccatggatttggagatatgaatgatcaaactttgggtgtagctaaaaaaattgtagaatacgctttgagtgatgaagattcaaaactaacaaatcttgatttcttcgtacctaataatagcaaataccaatctcttattgggacagaataccatccagatgatttggttgacgtgattcgtatggaagataaaaagcaagaagttattccagtaactcatagtttgacggtgcaaaaaacagtagtcggtgagttgggagataagactaaaggcttccaatttgaacttgagttgaaagataaaactggacagcctattgtcgacgctctaaaaactaataatcaagatttagtagctaaagatgggaaatattcatttaatctaaagcatggtgacaccataagaatagaaggattaccgacgggatattcttatactctgaaagagactgaagctaaggattatatagtaaccgttgataacaaagttagtcaagaagctcaatcagcaagtgagaatgtcacagcagacaaagaagtcacttttgaaaaccgaaaagatcttgtcccaccaactggtttgacaacagatggggctatctatctttggttgttattacttgttccacttgggttatgggtttggctaattggtcgtaagggactaaaaaatgactaa

SEQ ID NO: 284 - DNA, 2244 bp, Streptococcus pyogenes; identical to SEQ ID NO: 283

SEQ ID NO: 285 - DNA, 2244 bp, Streptococcus pyogenes; identical to SEQ ID NO: 283

SEQ ID NO: 286 - DNA, 2244 bp, Streptococcus pyogenes; identical to SEQ ID NO: 283

SEQ ID NO: 287 - DNA, 2244 bp, Streptococcus pyogenes; identical to SEQ ID NO: 283

SEQ ID NO: 288 - DNA, 1434 bp, Streptococcus pyogenes
gaagaaaaatctactgaaactaaaaaaacgtcagtcattattagaaaatatgctgaaggtgactactctaaacttctagagggagcaactttgcgtttaacaggggaagatatcccagattttcaagaaaaagtcttccaaagtaatggaacaggagaaaagattgaattatcaaatgggacttataccttaacagaaacatcatctccagatggatataaaattacggagccgattaagtttagagtagtgaataaaaaagtatttatcgtccaaaaagatggttctcaagtggaaaacccaaacaaagaactaggttctccatatactatagaggcatacaatgattttgatgaatttggcttactgtcaacacaaaattatgcgaaattttattatggaaaaaactatgatggcagttcacaaattgtttattgcttcaatgccaacttgaaatctccacctgactcggaagatcatggtgctacaataaatcctgactttacgactggtgatattaggtacagtcatattgctggttcagatttgataaaatacgctaatacagctagggatgaagatcctcaattatttttaaaacacgtaaaaaaagtaattgaaaatgggtatcataaaaaaggtcaagctattccatataacggtctgactgaggcacagtttcgtgcggctactcaactggcaatttattattttacagatagtgttgacttaactaaggatagattgaaagacttccatggatttggagatatgaatgatcaaactttgggtgtagctaaaaaaattgtagaatacgctttgagtgatgaagattcaaaactaacaaatcttgatttcttcgtacctaataatagcaaataccaatctcttattgggacagaataccatccagatgatttggttgacgtgattcgtatggaagataaaaagcaagaagttattccagtaactcatagtttgacggtgcaaaaaacagtagtcggtgagttgggagataagactaaaggctttcaatttgaacttgagttgaaagataaaactggacagcctattgttaacactctaaaaactaataatcaagatttagtagctaaagatgggaaatattcatttaatctaaagcatggtgacaccataagaatagaaggattaccgacgggatattcttataccctgaaagagactgaagctaaggattatatagtaactgttgataacaaagttagtcaagaagctcaatcagcaagtgagaatgtcacagcagacaaagaagtcacttttgaaaaccgaaaagatcttgtcccaccaactggtttgacaacagatggggctatctatctttggttattactacttgttccatttgggttattggtttggctatttggtcgtaaagggttaaaaaatgactaa

SEQ ID NO: 289 - DNA, 1322 bp, Streptococcus pyogenes
  misc_feature (1)...(1322): n = A,T,C or G
gctgaagaaaaatctactgaaactaaaaaaacgtcagtcattattagaaaatatgctgaaggtgactactctaaacttctagagggagcaactttgcgtttaacaggggaagatatcccagattttcaagaaaaagtcttccaaagtaatggaacaggagaaaagattgaattatcaaatgggacttataccttaacagaaacatcatctccagatggatataaaattacggagccgattaagtttagagtagtgaataaaaaagtatttatcgtccaaaaagatggttctcaagtggaaaacccaaacaaagaactaggttctccatatactatagaggcatacaatgattttgatgaatttggcttactgtcaacacaaaattatgcgaaattttattatggaaaaaactatgatggcagttcacaaattgtttattgcttcaatgccaacttgaaatctccacctgactcggaagatcatggtgctacaataaatcctgactttacgactggtgatattaggtacagtcatattgctggttcagatttgataaaatacgctaatacagctagggatgaagnnnnnnnnnnnnnnnnnnnnnnnnnnnnnnnnnnnnntgaaaatgngtatcataaaaaaggtcaagctattccatataacggtctgactgaggcacagtttcgtgcggctactcaactggcaatttattatttnacagatagtgttgacttaactaaggatagattgaaagacttccatggatttggagatatgaatgatcaaactttgggtgtagctaaaaaaattgtagaatacgctttgagtgatgaagattcaaaactaacaaatcttgatttcttcgtacctaataatagcaaataccaatctcttattgggacagaataccatccagatgatttggttgacgtgattcgtatggaagataaaaagcaagaagttattccagtaactcatagtttgacggtgcaaaaaacagtagtcggtgagttgggagataagactaaaggctttcaatttgaacttgagttgaaagataaaactggacagcctattgttaacactctaaaaactaataatcaagatttagtagctaaagatgggaaatattcatttaatctaaagcatggtgacaccataagaatagaaggattaccgacgggatattcttataccctgaaagagactgaagctaaggattatatagtaactgttgataacaaagttagtcaagaagctcaatcagcaagtgagaatgtcacagcagacaaagaagtcacttttgaaaaccgaaaagatct

SEQ ID NO: 290 - DNA, 2109 bp, Streptococcus pyogenes
atgaataacaaaaaattgcaaaagaagcaagatgctcctcgggtatcaaacagaaagccaaaacaattaactgtcactttagtgggagtatttttaatgctcttagtattgataggatttgaaggaaaagttcgagcagctcacgaattggttgaggtaccagtacctatttttcacaatccagatccacagtcagactatcagtggtatggctatgaagcctatacaagggggtatccgaagtatgatttattcaagacatactatcatgatctgagagtgaatttgcatgggagtaaaagttatcaagtatattgttttaacgttcacaaacactatcctcgttcctcccagagttttgatcggaagtggtataaaaaattagatggaactgctgagaattttgattctcttgctatggaaccaagagttcgtaaagaggagttaaccaaaaaactccgagctgttatgtataatgcctatcctaatgatgctaatggcattataaaagatttagagcctttaaatgctattaaagtcactcaagaggctgtatggtactattctgattcagctcaaattaatccggatgaaagttttaaaacagaagctcaaagtaatggtattaatgaccagcagttaggcttaatgcgaaaagctttaaaagaactaattgatccaaacttagggtcaaaatattcgaataaaactccatcaggttatcggttaaatgtatttgaatctcatgataagactttccaaaatcttttgagtgctgagtatgttccggatactcccccaaaaccaggagaagagcctccggctaaaactgaaaaaacatcagtcattatcagaaaatatgcggaaggtgactactctaaacttctagagggagcaactttgcgtttaacaggggaagatatcccagattttcaagaaaaagtcttccaaagtaatggaacaggagaaaagattgaattatcaaatgggacttataccttaacagaaacatcatctccagatggatataaaattgcggagccgattaagtttagagtagtgaataaaaaagtatttatcgtccaaaaagatggttctcaagtggaaaatccaaacaaagaagtaggttctccatatactatagaggcatacaatgattttgatgaatttggcttactgtcaacacaaaattatgcgaaattttattatggaaaaaactatgatggcagttcacaaattgtttattgcttcaatgccaacttgaaatccccacctgactcggaagatcatggtgctacaataaatcctgactttacgactggtgatattaggtatagtcatattgctggttcagatttgataaaatacgctaatacagctagggatgaagatcctcaattatttttaaaacacgtaaaaaaagtaattgaaaatgggtatcataaaaaaggtcaagctattccatataacggtctgactgaggcacagtttcgcgcggctactcaactggcaatttattattttacagatagtgttgacttaactaaggatagattgaaagacttccatggatttggagatatgaatgatcaaactttgggtgtagctaaaaaaattgtagaatacgctttgagtgatgaagattcaaaactaacaaatcttgatttcttcgtacctaataatagcaaataccaatctcttattgggacagaataccatccagatgatttggttgacgtgattcgtatggaagataaaaagcaagaagttattccagtaactcatagtttgacggtgcaaaaaacagtagtcggtgagttgggagataagactaaaggcttccaatttgaacttgagttgaaagataaaactggacagcctattgtcgacgctctaaaaactaataatcaagatttagtagctaaagatgggaaatattcatttaatctaaagcatggtgacaccataagaatagaaggattaccgacgggatattcttatactctgaaagagactgaagctaaggattatatagtaaccgttgataacaaagttagtcaagaagctcaatcagcaagtgagaatgtcacagcagacaaagaagtcact

SEQ ID NO: 291 - DNA, 648 bp, Streptococcus pyogenes
atgaaaaaatctatattaagaattttagctattggttatttacttatgagtttttgtttgttagactccgtagaggcagagaacctcactgcaagcattaatattgaagttattaatcaagttgatgttgctaccaacaaacaatcctctgacatagatgaaacgtttatgtttgtaattgaagcgttagataaagaaagtcctttacctaattcggtaactacttctgttaagggaaatgggaaaacatcatttgaacagttgactttttcagaagttggacaatatcattataaaattcatcaactgttaggtaagaatagtcaatatcattatgatgaaacagtatatgaagttgttatttacgtattgtataatgagcaaagtggtgctttagaaactaacctagtttctaacaaacttggagaaaccgaaaaatcggagcttatttttaaacaagaatatagtgaaaaaacaccggaacctcatcaaccagatacaactgagaaggaaaaacctcagaaaaaacgtaatggtattttgccatcaactggtgaaatggtgagttacgtatctgctttaggaattgtcttagtggctaccattactttgtattctatttataaaaagctaaagacaagcaaatag

SEQ ID NO: 292 - DNA, 924 bp, Streptococcus pyogenes
atgaaacaaacattaaaacttatggtttcttttctggtgatgttagggactatgtttggaattagccaaactgttttagcgcaaggaactcatcaattgacgattgtccatctcgaagcgagggatattgatcgtccatatccacagttggatatcgcccctaaagaagggactccaactgaaggagtactttatcaattgtaccaattgaaatcaactgaagatggcgatttgttggcacattggaattccctaactatcacagaattgaaaaaacaggcgcagcaggtttttgaagccactactaatcaacaaggaaaggctacatttaaccaactaccagatggaatttattatggtctagcggttaaagctggtgaaaaagatcgtaatgtctcagctttcttggttgacttgtctgaggataaagtgatttatcctaaaataatctggtccacaggtgagttggacttgcttaaagttggtgtggatggtgataccaaaaaaccactagcaggtgttgtctttgaactttatgaaaaggatggtatggttcctattcgtgtgaaaaatggagtgcattctcaagatattgacgctgcaaaacgtttagagacagactcatcaggacatatcagaatttcaggtctcattcctggggactatgttttaaaagaaattgagacacggtcaggatatcagattgaccagtcagagactgctgtaactattgaaaaatcaaaaacagtaacagtaacaattaaaaatcaaaaaattccgtcacctaaagtgccacctcgaggaggttttattcctaaaacaggtgagcaacaggcaatgatactggtaattattggtggtattttaattgctttagctttacgattactatcaaaacaccggaaaaatcaagataagcattag

SEQ ID NO: 293 - DNA, 924 bp, Streptococcus pyogenes; identical to SEQ ID NO: 292

SEQ ID NO: 294 - DNA, 924 bp, Streptococcus pyogenes; identical to SEQ ID NO: 292

SEQ ID NO: 295 - DNA, 924 bp, Streptococcus pyogenes; identical to SEQ ID NO: 292

SEQ ID NO: 296 - DNA, 552 bp, Streptococcus pyogenes
atgatattaaccatgctggcctttaatcagactgttttagcaaaagacagcactgttcaaactagcattagtgtcgaaaatgtcttagagagagcaggcgatagtactccattttcgattgcattagaatcaattgatgcgatgaaaacaatagaagaaataacaattgctggttctgggaaagcaagcttttcccctctgaccttcacaacagttgggcaatatacttatcgtgtttatcagaagccttcacaaaataaagattatcaagcagatactactgtatttgacgttcttgtctatgtgacctatgatgaagatgggactctagtcgcaaaagttatttctcgaagggctggagacgaagaaaaatcagcgattacttttaagcccaaatggttagtaaaaccaataccgcctagacaacctaacatccctaaaaccccattaccattagctggtgaagtaaaaagtttattgggtatcttaagtatcgtattactggggttactagttcttctttatgttaaaaaactaaagagtaggctataa

SEQ ID NO: 297 - DNA, 552 bp, Streptococcus pyogenes; identical to SEQ ID NO: 296

SEQ ID NO: 298 - DNA, 846 bp, Streptococcus pyogenes
atgggaggtacacaattgaaaataggacgattgattcgcttgatgctatcgatttgcgcttgtttgtactttttgacgtctcctatttttgctttgcagaaaacgtcatccgtgacgattcattttgagaattctgataaggatacacaactagcgttgtggcaattgcccgagggacaaactttgcccgaactggaaacactatttgagaagacagatgctgagttaacccgtcagtatcctcaagtatcaactgtcacagtaccaaaaggtgagactaagcttgtattatcaaatctacctgtaggagcgatttactacgttagagaggcagaagaacgcttaggagttcgctcgctagcgccctttatcttgaaggttgatacagatgatgatcaggccgtttatacaaagaaagcaaaggcccaaaaacgtggttcgtacccttttgttaaagtttctgctcaaggtggtagtctagaaggagcaacttttgaggtttggaaacaaacccaaaaacagctacaacctgttattaaaggtagcagtcggtatctcctaacgtcctcgaaagatggttcttttatggcaagagatttgccatttgggtcttatgttttaaaagaaatcactgctccaaaaggttatcttttgtcaaaaaaaactataccatttgaagtaacagattattcagaaaaacaagcccctgtgaaagtcgtcaaccagcccaagatccctcctagaattgaaattccctatacaggtaatgcgattatgattttggtggttttacttggttttgcactatttacactaggtgtctatctggtacgtaggaacggttaa

SEQ ID NO: 299 - DNA, 846 bp, Streptococcus pyogenes; identical to SEQ ID NO: 298

SEQ ID NO: 300 - DNA, 846 bp, Streptococcus pyogenes; identical to SEQ ID NO: 298

SEQ ID NO: 301 - DNA, 570 bp, Streptococcus pyogenes
atgttattttctgtcgtaatgatattaaccatgctggcctttaatcagactgttttagcaaaagacagcactgttcaaactagcattagtgtcgaaaatgtcttagagagagcaggcgatagtaccccattttcgattgcattagaatcaattgatgcgatgaaaacaatagaagaaataacaattgctggttctggaaaagcgagcttttcccctctgaccttcacaacagttgggcaatatacttatcgtgtttatcagaagccttcacaaaataaagattatcaagcagatactactgtatttgacgttcttgtctatgtgacctatgatgaagatgggactctagtcgcaaaagttattcctcgaagggctggagacgaagaaaaatcagcgattacttttaagcccaaacggttagtaaaaccaataccgcctagacaacctgacatccctaaaaccccattaccattagctggtgaagtaaaaagtttattgggtatcttaagtatcgtattactggggttactagttcttctttatgttaaaaaactgaagagtaggctataa

SEQ ID NO: 302 - DNA, 570 bp, Streptococcus pyogenes
atgttattttctgtcgtaatgatattaaccatgctggcctttaatcagactgttttagcaaaagacagcactgttcaaactagcattagtgtcgaaaatgtcttagagagagcaggcgatagtaccccattttcgattgcattagaatcaattgatgcgatgaaaacaatagaagaaataacaattgctggttctggaaaagcaagcttttcccctctgaccttcacaacagttgggcaatatacttatcgtgtttatcagaagccttcacaaactaaagattatcaagcagatactactgtatttgacgttcttgtctatgtgacctatgatgaagatgggactctagtcgcaaaagttattcctcgaagggctggagacgaagaaaaatcagcgattacttttaagcccaaacggttagtaaaaccaataccgcctagacaacctgacatccctaaaaccccattaccattagctggtgaagtaaaaagtttattgggtatcttaagtatcgtattactagggttactagttcttctttatgttaaaaaactgaagagtaggctataa

SEQ ID NO: 303 - DNA, 570 bp, Streptococcus pyogenes
atgttattttctgtcgtaatgatattaaccatgctggcctttaatcagactgttttagcaaaagacagcactgttcaaactagcattagtgtcgaaaatgtcttagagagagcaggcgatagtaccccattttcgattgcattagaatcaattgatgcgatgaaaacaatagaagaaataacaattgctggttctggaaaagcgagcttttcccctctgaccttcacaacagttgggcaatatacttatcgtgtttatcagaagccttcacaaaataaagattatcaagcagatactactgtatttgacgttcttgtctatgtgacctatgatgaagatgggactctagtcgcaaaagttatttctcgaagggctggagacgaagaaaaatcagcgattacttttaagcccaaacggttagtaaaaccaataccgcctagacaacctgacatccctaaaaccccattaccattagctggtgaagtaaaaagtttattgggtatcttaagtatcgtattactggggttactagttcttctttatgttaaaaaactgaagagtaggctataa

SEQ ID NO: 304 - DNA, 570 bp, Streptococcus pyogenes
atgttattttctgtcgtaatgatattaaccatgctggcctttaatcagactgttttagcaaaagacagcactgttcaaactagcattagtgtcgaaaatgtcttagagagagcaggcgatagtaccccattttcgattgcattagaatcaattgatgcgatgaaaacaatagaagaaataacaattgctggttctggaaaagcaagcttttcccctctgaccttcacaacagttgggcaatatacttatcgtgtttatcagaagccttcacaaaataaagattatcaagcagatactactgtatttgacgttcttgtctatgtgacctatgatgaagatgggactctagtcgcaaaagttatttctcgaagggctggagacgaagaaaaatcagcgattacttttaagcccaaacggttagtaaaaccaataccgcctagacaacctaacatccctaaaaccccattaccattagctggtgaagtaaaaagtttattgggtatcttaagtatcgtattactggggttactagttcttctttatgttaaaaaactgaagagtaagctataa

SEQ ID NO: 305 - DNA, 570 bp, Streptococcus pyogenes; identical to SEQ ID NO: 304

SEQ ID NO: 306 - DNA, 570 bp, Streptococcus pyogenes; identical to SEQ ID NO: 304

SEQ ID NO: 307 - DNA, 570 bp, Streptococcus pyogenes
atgttattttctgtcgtaatgatattaaccatgctggcctttaatcagactgttttagcaaaagacaacactgttcaaactagcattagtgtcgaaaatgtcttagagagagcaggcgatagtaccccattttcgattgcattagaatcaattgatgcgatgaaaacaatagaagaagtaacaattgctggttctggaaaagcaagcttttcccctctgaccttcacaacagttgggcaatatacttatcgtgtttatcagaagccttcacaaaataaagattatcaagcagatactactgtatttgacgttcttgtttatgtgacctatgatgaagatgggactctagtcgcaaaagttatttctcgaagggctggagacgaagaaaaatcagcgattacttttaagcccaaacggttagtaaaaccaataccgcctagacaacctgacatccctaaaaccccattaccattagctggtgaagtaaaaagtttattgggtatcttaagtatcgtattcctggggttactagttcttctttatgttaaaaaactgaagagtaggctataa

SEQ ID NO: 308 - DNA, 570 bp, Streptococcus pyogenes; identical to SEQ ID NO: 307

SEQ ID NO: 309 - DNA, 570 bp, Streptococcus pyogenes
atgttattttctgtcgtaatgatattaaccatgctggcctttaatcagactgttttagcaaaagacaacactgttcaaactagcattagtgtcgaaaatgtcttagagagagcaggcgatagtaccccattttcgattgcattagaatcaattgatgcgatgaaaacaatagaagaagtaacaattgctggttctggaaaagcaagcttttcccctctgaccttcacaacagttgggcaatatacttatcgtgtttatcagaagccttcacaaaataaagattatcaagcagatactactgtatttgacgttcttgtttatgtgacctatgatgaagatgggactctagtcgcaaaagttatttctcgaagggctggagacgaagaaaaatcagcgattacttttaagcccaaacggttagtaaaaccaataccgcctagacaacctgacatccctaaaaccccattaccattagctggtgaagtaaaaagtttattgggtatcttaagtatcgtattactggggttactagttcttctttatgttaaaaaactgaagagtaggctataa

SEQ ID NO: 310 - DNA, 570 bp, Streptococcus pyogenes
atgttattttctgtcgtaatgatattaaccatgctggcctttaatcagactgttttagcaaaagacagcactgttcaaactagcattagtgtcgaaaatgtcttagagagagcaggcgatagtaccccattttcgattgcattagaatcaattgatgcgatgaaaacaatagaagaaataacaattgctggttctggaaaagcaagcttttcccctctgaccttcacaacagttgggcaatatacttatcgtgtttatcagaagccttcacaaaataaagattatcaagcagatactactgtatttgacgttcttgtctatgtgacctatgatgaagatgagactctagccgcaaaagttatttctcgaagggctggagacgaagaaaaatcagcgattacttttaagcccaaacggttagtaaaaccaataccgcctagacaacctgacatccctaaaaccccattaccattagctggtgaagtaaaaagtttattgggtatcttaagtatcgtattactgggattactagttcttctttatgttaaaaaactgaagagtaggctataa

SEQ ID NO: 311 - DNA, 570 bp, Streptococcus pyogenes; identical to SEQ ID NO: 310

SEQ ID NO: 312 - DNA, 570 bp, Streptococcus pyogenes; identical to SEQ ID NO: 310

SEQ ID NO: 313 - DNA, 570 bp, Streptococcus pyogenes; identical to SEQ ID NO: 310

SEQ ID NO: 314 - DNA, 570 bp, Streptococcus pyogenes; identical to SEQ ID NO: 310

SEQ ID NO: 315 - DNA, 570 bp, Streptococcus pyogenes; identical to SEQ ID NO: 310

SEQ ID NO: 316 - DNA, 570 bp, Streptococcus pyogenes
atgttattttctgtcgtaatgatattaaccatgctggcctttaatcagactgttttagcaaaagacagcactgttcaaactagcattagtgtcgaaaatgtcttagagagagcaggcgatagtaccccattttcggttgcattagaatcaattgatgcgatgaaaacaatagacgaaataacaattgctggttctggaaaagcaagcttttcccctctgaccttcacaacagttgggcaatatacttatcgtgtttatcagaagccttcacaaaataaagattatcaagcagatactactgtatttgacgttcttgtctatgtgacctatgatgaagatgggactctagtcgcaaaagttatttctcgaagggctggagacgaagaaaaatcagcgattacttttaagcccaaacggttagtaaaaccaataccgcctagacaacctaacatccctaaaaccccattaccattagctggtgaagtaaaaagtttattgggtatcttaagtatcgtattactggggttactagttcttctttatgttaaaaaactgaagagtaggctataa

SEQ ID NO: 317 - DNA, 570 bp, Streptococcus pyogenes; identical to SEQ ID NO: 301

SEQ ID NO: 318 - DNA, 570 bp, Streptococcus pyogenes; identical to SEQ ID NO: 309

SEQ ID NO: 319 - DNA, 933 bp, Streptococcus pyogenes
atgcaaaaattattgaaatacctttgttcttttggggtggttttgggattgttgctaggttttccgggacaggttttggctcagggagaccaggcccaactaacggttgtacatttagaatcacgggatgtggatcgtccaaatcctcaattggatttggctcccagtgctgggaagccggttgaaggaataacgtatcgtctttaccagctcaaattaggacgagaagcccagcccatttcttattgggaaaagctgacgcttcaagcgttagaggagcaagcccagacggtgtttgaggctaagacagatgcgcaagggcatgccgcttttttacagctaccgattggaatttattacggggtagctgtggagaatcaacagcgtcaagctggcatagcaggcttcttggtagatcttacaggagatacgggttatgtgaagaccgtttatcctaaggttatttggcctacaggtgggttacaccttatcaaatacggtgttgatgggcaaactaaggtacctcttgctggggttaggtttgaactttatgaggataatggatttaaacccttgcgcgtgaaagatgggcttcattcttatgatttggacgctaagacaacattaatcactaatcaagaagggcaacttaaagtagctggactacttgctggtaattattaccttaaagaagtggcgacggccaaaggttatcgcctgaaaacagatgctatttcatttcaagtgcaagcgcatcaaaccaagacggttagtgttgacaaccaaaaagaaccgcctccaccagtaacaccttgggattggattccaagaacaggggaagcgcaggcgcttacgttaattgtgctagggctcatcttaatgcttcttgctttattttactatcaaaagcatcgtcaagagggcaacgattag

SEQ ID NO: 320 - DNA, 570 bp, Streptococcus pyogenes; identical to SEQ ID NO: 316

SEQ ID NO: 321 - DNA, 570 bp, Streptococcus pyogenes
atgttattttctgtcgtaatgatattaaccatgctggcctttaatcagactgttttagcaaaagacagcactgttcaaactagcattagtgtcgaaaatgtcttagagagagcaggcgatagtaccccattttcgattgcattagaatcaattgatgcgatgaaaacaatagaagaaataacaattgctggttctggaaaagcaagcttttcccctctgaccttcacaacagttgggcaatatacttatcgtgtttatcagaagccttcacaaaataaagattatcaagcagatactactgtatttgacgttcttgtctatgtgacctatgatgaagatgggactctagtcgcaaaagttatttctcgaagggctggagacgaagaagaatcagcgattacttttaagcccaaacggttagtaaaaccaataccgcctagacaacctaacatccctaaaaccccattaccattagctggtgaagtaaaaagtttattgggtatcttaagtatcgtattactggggttactagttcttctttatgttaaaaaactgaagagtaagctataa

SEQ ID NO: 322 - DNA, 570 bp, Streptococcus pyogenes; identical to SEQ ID NO: 304

SEQ ID NO: 323 - DNA, 570 bp, Streptococcus pyogenes; identical to SEQ ID NO: 304

SEQ ID NO: 324 - DNA, 570 bp, Streptococcus pyogenes; identical to SEQ ID NO: 304

SEQ ID NO: 325 - DNA, 570 bp, Streptococcus pyogenes; identical to SEQ ID NO: 304

SEQ ID NO: 326 - DNA, 570 bp, Streptococcus pyogenes; identical to SEQ ID NO: 304
